United States Patent Application Publication US 2021/0084934 A1 - sequence listing, part 2

SEQ ID NO: 1 - DNA, 4118210 bp, Bacillus subtilis (residues 2,059,106-4,118,210 of 4,118,210)
ggaatagctgttaaagacagtcttacttattatatttgtgctgcctattcattgtcaacttcagcagtgcttttatttcttacaaccataataggataacataccttaaccagtttagaaaccttatttttcatattcctttttttaacgcaaaaaaaaaagccgtgctcccccgaaaaaacgacatgtggataatttttttgcctttttttaatatccacagtcgttatcgacaacattttcacattgctaactcctgtggacaaagatttttcaacaagttgtcaggtttgtggataagattacgagaaccattgcaagtcctcgcttaatttgatattatatttgtgttttaactcttaattacttatccagcccattctctttatccacaaactgtggataagttgtggattgttttcacacagcttgtgtagattgttgtccacaacttgtggaatttgtcgaaaagctgtttttctactatactatatgttttcaacatttcgtgtgtacgaatggtcagagccatatgctctttttttgtgttctataacagggaaagggcgctgatttttaaagaaaaggagggctgtgccggataatggagaatatattagatctttggaatcaagctctagctcaaattgagaaaaagctaagcaaaccgagtttcgaaacttggatgaagtcgacgaaagcccattcgctgcaaggggataccttaaccatcaccgctcccaatgaatttgccagagactggctggagtccaggtacttacatctcattgcagataccatatacgaattaaccggggaagagttgagcgtcaaatttgtcattcctcaaaatcaggaggaagaaaactttttaccgaaaccgcaagtgaaaaaagcggcaaaagaggaaccgtctgattttccccaaagcatgctcaacccgaaatatacattcgacacattcgtcatcggatcgggaaaccgattcgcccatgcagcatcactggctgtggcggaagcacccgctaaagcgtacaaccctttatttatatacgggggagtcggcttaggaaaaacccacttaatgcacgcgatcggccattatgtcattgatcataatccttcagccaaagtggtgtacctgtcttctgaaaaattcacaaatgaattcatcaactcaatccgcgataataaagccgttgatttccgcaaccgctaccggaacgttgatgtacttttgatagatgatattcaatttttagccggaaaagaacaaacacaggaagagtttttccatacattcaacacgcttcatgaagaaagcaaacaaatcgtgatttccagcgacagaccgccgaaagagatcccgacccttgaagaccgcctgcgttcgcggttcgaatggggattgattacggatatcacaccgccggatctggaaacgcggattgccatcctgagaaaaaaagcgaaggcggaaggccttgatattccgaacgaggtcatgctttacatcgcgaatcagattgacagcaacatccgcgaactggaaggggcattaatccgggttgtcgcctattcatctttaatcaataaagacattaacgcagacctggctgcagaagcattgaaagatattattccgtcttctaagccgaaggtcattacgataaaagagattcagcggattgtcggacagcagttcaacattaagcttgaagatttcaaagcgaaaaagcgcacgaaatccgtggcgttcccaagacaaattgcgatgtatctttcaagagaaatgacggattcttctttgcctaaaatcggggaagaatttggcggcagagaccatacaaccgtcattcacgcccatgaaaagatttcaaaactgctgattgatgacgagcagcttcagcagcaggtgaaagaaataaaagaactgcttaaataatagtgccctcggatgaatcggggaaagtgtgaataactttttcatagccatacacagtctgtccacatgtggataggctgtgtttcctgtctttttcacaacttatccacaaatccacaggccctactattactactgctatttttaaaatatattaattatattatccgttaggaggataaacatgaaatttacgattcaaaaagatcggttagtcgaaagtgtacaagacgttctaaaagccgtttcatccagaaccacaattcccattctcaccggtattaagatcgtcgcctcagatgaaggagtatctttcacaggaagtgactctgatatttcaatcgagtcattcattccgaaagaagatgatgataaagaaatcgtgacgatcgatcagccgggaagtatcgtgctgcaagcgcgtttcttcagcgaaatcgttaaaaaacttccgatggcgactgttgaaatcgaagttcaaaatcaatatttaacgattatccgttccggaaaagccgaatttaatttaaacggccttgatgcagatgaatatccgcatctgccgcaaatcgaagagcatcacgccattcagattccgacggatcttttgaaaaacctgattcgccaaaccgtgttcgcggtgtccgcctcagaaacacgccctatcttgacaggtgtaaactggaaagtcgaaaacggtgaattattatgcactgccacggatagccaccgactcgctttaagaaaggcgaagcttgatattccggaagacagctcttataacgtggtcattcccgggaaaagcttaaccgagctgagcaaaattcttgatgacaaccaagaactggttgatatcgtcattacagaaacccaagttctgttcaaagcgaaaaacgtattgttcttctcaagattgcttgacggaaactatccggacacgaccagcttaattccgcaggaaagcaaaacggaaatcgtcgtgaacacgaaggaatttttacaggcgatagaccgtgcttctttattggcgagagaaggccgcaacaacgttgtaaagctttctgccaaaccggcggattcgctggagatttcatcaaattctccggaaatcgggaaagtggtcgaagctgttctggctgaccagattgacggcgaggaattaaatatttcattcagtccaaaatatatgatggacgcactgaaagtacttgaaggagcggacatccgtatcagttttacgggagcgatgagaccgtttcttatccgtacgccgaatgatgaaaccatcgttcagctcatccttccggtcagaacgtattaatcaaacagaatgtgctgccggcttagttcggcagcttttctattcatcagccgctccctcaagttttccctttccttatttcaggattttttagtacaattagatattagtgatatttgaaagaggtcgataatatggcaaatccgatttcgattgatacagaaatgattacgcttggccagtttttaaaattagccgatgtgattcagtccggcggcatggcgaagtggtttctgagcgagcatgaggtgactgtcaacaatgaacctgacaatcgccgcggcagaaagctttacgttggagacgtggtcgcgattgaaggatttggttcatttcaagtcgtcaattaaagcgggtgacagcggttgtatatccaaaatttagaattaacatcctaccgtaattatgagcgcgctgagcttcaattcgaaaacaaggtgaatgtgatcatcggggaaaatgcccaaggcaaaaccaatctgatggaagccatctatgtcctttcgatggcaaaatcacaccgcacctcaaatgacaaagaacttatacggtgggacgaagactatgctaaaatagaaggaagagtgatgaagcgaaacggggatatcccgatgcagcttgtcatctccaaaaaaggtaaaaagggcaaggtcaatcatatagagcagcaaaaactcagtcagtatgtcggggcgctgaacaccattatgtttgcccctgaggatttaaatctcgtcaaaggaagcccccaggtgaggaggagatttctcgatatggagatcgggcaggtttctgccgtttatctgtatgatttatctctttatcaaaaaatcctttcacagcggaatcattttctgaaacagctgcaaagccggaaacagactgaccggaccatgcttgacgttctcactgatcagctgattgaagcagccgcaaaagttgtcgccaaacgtctgcagtttacggcgcagcttgaaaaatgggcgcagccgatccattccggcatttcccggggacttgaagaactgacgcttaagtatcacacggcgcttgatgtatcagatcccaaagatttgtcgaaaataggtaacagctaccaggagtctttttcgaaattaaaagaaaaagaaatagaacgaggcgtcacattattcggaccgcatcgggatgatgtccttttttatgtgaacggacgcgatgtgcagacgtacggttcacagggacagcagcgtacgacggctttgtctttgaagctggccgaaatagatttgattcatgaagaaatcggagaataccccattttacttttggatgatgtactaagcgagctggatgattaccgacagtcccatttgcttcatacgatccaaggccgtgtgcagacatttgtcaccacgacaagcgtggatggcattgaccacgataccttacatcaagcaggaatgttccgtgtggaaaacggtacgttagtgaagtgaagaaatgaggtgagcgattgtatattcatttaggtgacgactttgtcgtttcaacacgcgatatcgtcggcatttttgactgcaaggtcaatgtatcgccgatcgttgaagaatttctggacagacagaaagaaaaagtagtgccgtccgtaaacggcacgccaaagtctatcgtagtcacgactgagaatatatattactctcccttatcttccggcacactgaagaaacgtgcgcaatttatgttagaaatagattcttagcggatctttacaatgaatatatcgtttaagaaaagtgtaggtgaatgtgcatggctatggaacagcagcaaaatagttatgatgagaatcagatacaggtattagaaggtttggaagctgttcgaaagagaccggggatgtacatcggatcaactaacagcaaaggccttcaccacttggtgtgggaaatcgtcgacaacagtattgacgaagccctggccggttattgtacagatattaacatcgagattgaaaaagataacagcattaccgttaaggacaacgggcgcggaattccggtcggtatccaggagaagatgggccgccctgcggttgaagtcatcatgaccgttctccacgccggcggtaaatttgacggaagcggatataaagtatccggcggtcttcacggtgtaggggcgtctgtcgtaaacgccttgtcgaccactcttgacgttacggttcatcgtgacggaaaaatccactatcaggcgtacgagcgcggtgtacctgtggccgatcttgaagtgatcggtgatactgataagaccggaacgattacgcacttcgttccggatccggaaatcttcaaagaaacaatcgtatacgactatgatctgctttcaaaccgtgtccgggaattggccttcctgacaaaaggcgtaaacatcacgattgaagacaaacgtgaaggacaagaacggaaaaacgagtaccactacgaaggcggaatcaaaagctatgttgagtacttaaaccgttccaaagaagtcgttcatgaagagccgatttatatcgaaggcgagaaagacggcataacggttgaagttgcattgcaatacaacgacagctatacaagcaatatttattctttcacgaataatatcaacacatacgaaggcgggacgcacgaagccggatttaaaaccggtctgacccgtgtcataaacgactatgcaagaagaaaagggattttcaaagaaaatgatccgaatttaagcggggatgatgtgagagaagggctgactgccattatttcaattaagcaccctgatccgcaattcgaagggcagacgaaaaccaagctcggcaactccgaagcgagaacgatcactgatacgctgttttcttctgcgctggaaacattccttcttgaaaatccggactcagcccgcaaaatcgttgaaaaaggtttaatggccgcaagagcgcggatggcagcgaaaaaagcgcgggaattgacccggcgcaaaagtgcgcttgagatttccaatctgccgggcaaactggcggactgttcttctaaagatccgagcatttccgagctgtatatcgtagagggtgactctgcgggcggatcagcgaaacagggacgggaccgtcatttccaagctattctgccgctgcgcggtaagattctgaacgttgagaaagccagacttgataagattctctcaaacaatgaggtcagatcaatgatcacggccctcggaacaggaatcggagaagattttaatcttgaaaaagcgcgttatcataaagtggtcatcatgacggatgccgatgttgacggcgcccacatcagaacgcttttattaacgttcttctacagatacatgcgggaaatcatcgaaaacggctatgtctacattgcccagccgccgctttataaagtgcagcagggaaaacgggtggaatacgcttataacgataagcagcttgatgagctgttaaaagagcttccgcaatcacctaagcccggcctccagcgttataaaggtcttggagaaatgaacgcgactcagctttgggaaacgacaatggaccctgcgaccagaacgcttctgcaagtcaatcttgaagatgcaatggacgctgacgagacttttgaaatgctgatgggtgacaaagtagaaccgcggagaaacttcatagaagcaaacgccagatacgtaaaaaatcttgatatttaaccaagaaagccttattttcgttaagaaataaggcttttttctcaaagcggcttctaaagcctctgaaaacccgcaaaacccgtatattctactaaattaatgtgtataaacacaagtttattgatataatggagaatagtgaaatcgtattgaagatcataatggacaatctactcccacattatttcatgtgatacttcagggaggtttttttaatgagtgaacaaaacacaccacaagtacgtgaagtcaatatcagtcaggaaatgcggacatccttcctggactatgcaatgagcgttatcgtatcccgggcgcttccggatgtgcgtgacggtctgaagccggttcacaggcggattttgtacgcgatgaatgatttaggcatgaccagtgacaaaccatataaaaaatctgcccgtatcgtcggtgaagttatcggtaagtaccacccgcacggtgactcagcggtttacgaatcaatggtcagaatggcgcaggattttaactaccgctacatgcttgttgacggacacggcaacttcggttcggttgacggcgactcagcggccgcgatgcgttacacagaagcgagaatgtcaaaaatcgcaatggaaatccttcgggacattacgaaagatacgattgattatcaagataactatgacggcgcagaaagagaacctgtcgtcatgccttcgagatttccgaatctgctcgtcaacggagctgccggtattgcggtcggaatggcgacaaatattcctccgcatcagcttggggaagtcattgaaggcgtacttgccgtaagtgagaatcctgagattacaaaccaggagctgatggaatacatcccgggcccggattttccgactgcaggtcagattttaggccggagcggcatccgtaaggcatatgaatccggacggggatccattacgatccgggctaaggctgaaatcgaagagacatcatcgggaaaagaaagaattattgtcacggaacttccttatcaggtgaacaaagcgagattaattgaaaaaatcgcagatcttgtccgggacaaaaaaatcgaaggaattaccgatctgcgtgacgaatccgaccgtaacggaatgagaatcgtcattgagatccgccgtgacgccaatgctcacgtcattttgaataacctgtacaaacaaacggccctgcagacgtctttcggaatcaacctgctggcgctcgttgacggacagccgaaggtactaagcctgaaacaatgtctggagcattatcttgatcaccaaaaggttgtgatccggcgcagaacggcttacgaactccgcaaagcggaagcgagagctcacattctggaaggtttaagaattgctctcgatcatttagatgccgttatttctcttatccgcaattcccagacggctgaaattgcgagaacaggtttgatcgaacaattctcactgactgaaaaacaagcgcaagccattctggatatgcgccttcagcgattaaccggtctggagcgcgaaaagattgaagaggaatatcaatcacttgttgcgcttatcgccgagctgaaagatattttagccaatgaagcaagagttcttgagatcatccgtgaagaacttaatgaaatcaaagagcgtttcaatgatgagagacgcactgaaatcgtgacgtccggtcttgaaacaattgaagatgaagatcttatcgagagagaaaatatcgtcatcacactgacccataacggctatgttaaacgtctcccggcgtccacataccgcagccaaaaacggggcggaaaaggcgtacagggaatgggaacgaatgaagatgactttgtggaacacttaatttccacatcaacgcacgatacgatcctgttcttctctaataaagggaaggtataccgttctaaaggatatgaaatccctgaatacggccgtacggcaaaaggcattccgattattaaccttctggaggttgaaaaaggcgaatggattaatgctattattccggtcagcacgtttgatgaggagcaatacctcttctttacgaccaaacaaggggtgtcgaaacgtacggcactgtcccagtttgcgaatatacggaataacgggctgatcgccctaggtctccgggaagacgatgaactgatggccgtccgcctgactgacggcaagaaacaaatcatcatcggaacgaagaacggtttgctgatccgtttccctgaagcagatgtaagacaaatgggacgcacagctgcgggtgttaaaggcatcacgctgacagacgatgatgtcgttgtaggcatggagattcttgaagaagactcccacgtcctcatagtgacagaaaacggctacggcaaacgcacgccggcttcagaatacagagttcaaagccggggcggaaaaggccttaaaacatgtaaaatcactgacagcaacggtccgttagtaaccgtgaaagcaacaaaaggcgaagaggacttaatgattattacggcaagcggcgtgttaatcagaatggatattaatgatatctccactacgggacgcgtaacacaaggcgtccgtctgatccgcatgtctgatcaagagcatgtagccactgtggcgcttgtggaaaagaatgaagaagagccggaagaaacggaagaagtataaacgtagaagcgcagctgtagcaggctgcgcttttactatataaagaaatgaaaaaaagctttgacacatagtgatgatgctgatataatcatttttgttgtctttttaatagaaaggcaagcctagcgaaaatattttttaaaaaagtattgacctagcaaactgaaaatgttatgattaagaggtcgcttcgagagaagcaacaaagttctttgaaaactaaacaagacaaaacgtacctgttaattcaaagttttaaataaatcgcacagcgatgtgcgtagtcagtcaaactactttatcggagagtttgatcctggctcaggacgaacgctggcggcgtgcctaatacatgcaagtcgagcggacagatgggagcttgctccctgatgttagcggcggacgggtgagtaacacgtgggtaacctgcctgtaagactgggataactccgggaaaccggggctaataccggatggttgtctgaaccgcatggttcagacataaaaggtggcttcggctaccacttacagatggacccgcggcgcattagctagttggtgaggtaacggctcaccaaggcgacgatgcgtagccgacctgagagggtgatcggccacactgggactgagacacggcccagactcctacgggaggcagcagtagggaatcttccgcaatggacgaaagtctgacggagcaacgccgcgtgagtgatgaaggttttcggatcgtaaagctctgttgttagggaagaacaagtgccgttcaaatagggcggcaccttgacggtacctaaccagaaagccacggctaactacgtgccagcagccgcggtaatacgtaggtggcaagcgttgtccggaattgtgagacagttcggtccctatccgtcgcgggcgcaggaaatttgagaggagctgtccttagtacgagaggaccgggatggacgcaccgctggtgtaccagttgttctgccaagggcatcgctgggtagctatgtgcggacgggataagtgctgaaagcatctaagcatgaagcccccctcaagatgagatttcccattccgcaaggaagtaagatccctgaaagatgatcaggttgataggtctgaggtggaagtgtggcgacacatggagctgacagatactaatcgatcgaggacttaaccaatttgaatgtatgcttactgttatctagttttgagagaacactctcaatggtttggtggcgatagcgaagaggtcacacccgttcccatgccgaacacggaagttaagctcttcagcgccgatggtagtcgggggtttccccctgtgagagtaggacgccgccaagccattacacgcaagtgtaatatatggaggattagctcagctgggagagcatctgccttacaagcagagggtcggcggttcgagcccgtcatcctccaccattcctatcatacataagttggcgtattaagccggtgtagctcaattggtagagcaactgacttgtaatcagtaggttgggggttcaagtcctcttgccggcaccacctttatatgttatactatataagtctcttgtaataagagccattagctcagttggtagagcatctgacttttaatcagagggtcgaaggttcgagtccttcatggctcaccatgtttttcttgcggatgtggcggaattggcagacgcgctagaatcaggctctagtgtctttacagacgtgggggttcaagtcccttcatccgcattgccaaacgcggaagtagttcagtggtagaacatcaccttgccaaggtgggggtcgcgggttcgaatcccgtcttccgctccaactatactataccatccatgccggggtggtggaattggcagacacacaggacttaaaatcctgcggtaggtgactaccgtgccggttcaagtccggccctcggcacttattgttgcgcccgtagctcaattggatagagcgtttgactacggatcaaaaggttaggggttcgactcctctcgggcgcgccatacatacttttgaaaaacgggaagtagctcagcttggtagagcacatggtttgggaccatggggtcgcaggttcgaatcctgtcttcccgaccattttggggccttagctcagctgggagagcgcctgctttgcacgcaggaggtcagcggttcgatcccgctaggctccacttgattttaattgttttttggcggtgtagctcagctggctagagcgtacggttcatacccgtgaggtcgggggttcgatcccctccgccgctaccattggacctttagctcagttggttagagcagacggctcataaccgtccggtcgtaggttcgagtcctacaaggtccaccacttatacggaggaatacccaagtctggctgaagggatcggtcttgaaaaccgacaggggtgtcaaagcccgcgggggttcgaatccctcttcctccgccatatctaatttaattatcatcgcggggtggagcagttcggtagctcgtcgggctcataacccgaaggtcgcaggttcaaatcctgcccccgcaaccaaaaaaatggtccggtagttcagttggttagaatgcctgcctgtcacgcaggaggtcgcgggttcgagtcccgtccggaccgccatttataaaaaggctcggtagctcagttggtagagcaacggactgaaaatccgtgtgtcggcggttcgattccgtcccgagccaccatttaatttaatattgttttggcggttgtggcgaagtggttaacgcaccagattgtggctctggcactcgtgggttcgattcccatcaatcgccccaaacaacatgcgggtgtagtttagtggtaaaacctcagccttccaagctgatgtcgtgggttcgattcccatcacccgctccatttttatattgtcatgggcctgtagctcagctggttagagcgcacgcctgataagcgtgaggtcggtggttcgagtccactcaggcccaccatgatgatttttccacagtagctcagtggtagagctatcggctgttaaccgatcggtcgcaggttcgaatcctgcctgtggagccatacggagaagtactcaagtggctgaagaggcgcccctgctaagggtgtaggtcgtgtaagcggcgcgagggttcaaatccctccttctccgccataaggcccgttggtcaagcggttaagacaccgccctttcacggcggtaacacgggttcgaatcccgtacgggtcattaaaaaaccttgcataatatgcaaggttttttattatgcgttcatagtgtaaatggtaaaagacaggtatgtggcaaaagcgctccataataaataagggaccagaagccaggctgaagctttactgtatttaccggcaatgagcaacagaatgagtgttgtcaccgccacaagcaggcaatcgatagatgcagcaagcaaatttttctgtgtgaattgaaaatagctgaatccttgattcacgatataattgatgagaagcatcacccaaaaagctttggattctttacatgaaaactttgcgtatatcaaggctgctgagagcgaaataagcgcaaacaaaaccgcccatatgatgccgatcactgatccgctcggcgtccagtcaggtttttgcagtgcgtcataccattcactgtcgatgggaaagagaacccccgctaaagaaaacaagacatatgtaatgataaatacaataatcgcaccgatatacttctttttcatttgttccctccgtcattcaatgtcaatacgttagttcccttttttggaaatattaaaccttttaaaaggttcatgcatcattaagtgtatgagttttcagtgtaaaaatgcagcaaaccatttatttgtattcaaaaaccccggcaggccggggttttaatcagcatgaagatcgccaaaggtcgtcataattccttcttcgtccagttcctgttcatatttttcgtgtgctttgcttggatacacggaaatgttttttccggtaatatctgtcgcgataaagttttcataatcctcagcatagccgatgttttcttctgagttcattgtcatatccccatagctgagcggaggatcctctaaatcctgaggcgtttctgagtttccgtattcctcaacatcctgataagcatcttcactatcgtaagtcgcccggattgattcatcatcatcaaattcaaactgtccgaacggtgtttcctcctcaatcggcctgtctttggaaacggcatcctgcgaggaatattccgccaatgtcgtagccgtcggcagagcttcgagtctgtcataaggaatgtccttgccgctgacttcacatgtgccgtatgtgccgttttcaatttgtttcagagagtaatcaatgtcgcgaaggtgctcccgttcatggtcgagcaaagccaggtctttttcccgctcgtataattcggtcgcctgatcgccgggatgattgtcataggaagacaattcgccggatgactgatacgggaattcatcagctaactgaaattgatcattttctttaaagcggcttaaaatatcatgtctggcttcttccaattctttttttaagtgtgtgatctgttcgtttgtaagcacatcaatccctcgtttctatgtgatgcttactgttagtatgaacgcttttgcgcagaaaaatggtggataaaaatagtcattttcccatgaggaagtaaaaggatacagtgattgccgagagtggggaaagaaaattcaagtttgtttctttattcatttgcgcaaaaaggtttataataagaaatgcaggcattttgtcgtgctcacatctgtgtgtttgacacaaagtcatcacaggtgtattgtattaaaagcatttaacggattatggaggaatgtctcatggtgacaacggtgcagcatacgttccgagaggaagcagatcatgcattacataaagccaaacaagtcaaccatgctgtcttactgagctattcaagacgtattgcgtctttagaccctctatcatttttcaaagacggagcaaaaaaatataaaggcaaacgatttttttggtcagaacccggtagtgaattaacaatagtcggtcttggcacagaagcgctgttccaatcgaatgaaaaaaatggaaagcgttatcacgacgtttttgaacaatgggagcgctttaaaaagacggcttttcatattcatgaagaagaagaggcggcgcataccgcggtcggccctgtcttattcggcggtttttcatttaatcccgctgaagagagaggagacgaatggaacgggttcgaagaaggactgttctttatcccctcactcatgctgacaaagacggcagatggtgattatttaaccgtcaatcaatgggcggcagacggtaatcaggcagaagatacgctgaaacgtctgaaatctttttcggaagctttttcagtttcttcaatcgagtatgaagaatatcctgttttaacaaaagcggaagaacttgatgtggaaaactggcttgaagccattaaaacagcaacaaatgatatgaaagcaaatcaatatgataaagtcgtgctggcaagggaagtcgttttgtcatatgatgggcctattccggcggagagcgttgtccgcaagcttttgacggaccaaacgacaagctatgtttttgcgattgagcagggagataaatgctttgtcggcgcttcaccggaacggctgatcaaaaaatccggcaaagacgtcatgtccacctgtctggcaggttcaattaagcgcggagaaaatcaacaagaagatgagcgtctcggcaaagagctgctgcatgacgaaaaaaatctcgcggaacatgattttgtggttaagatgatacacgattctttcttgtcgagctgcagcgatgtgaaaaagcctgcaggtccgcaattatataaaacaaaaagtgttcagcatctatatacgccgatcacaggccatcttaaaacgtccgcttcgctgtttgatttaattgaaaagctgcatcccacaccggcattgggcggagctccccagcagaaagctgttgagattatcgctgatattgaaccgatgacacgcggatggtacgcggcaccgatcggctggatggacggcagggaaaacggagaatttgtcgtggctatccgatcagggctgattgaaggcaaaagtgcgcggcttttcgcaggctgcggcattgttgaagattcagatccgcaatcagaatatgaagaaacacaaattaaactaaagccgatgatctctgctttaggaggtgaaaggctttgacaaacccgattacacattatatcggaagctttattgatgaattcgctttatcgggtgtcaccgacgcagttgtttgcccggggtcgaggtcaactcccttggcggttttggcggcggcccacccggatattcaagtccatatacagattgatgaacgatccgcaggttttttcgcactcggtcttgcaaaagcccgccagcgtccggtcatgctgatttgtacgtcaggaacggcggcggctaacttctatccggccgtgattgaagctcattattcaagagtgcctcttattgtcctgactgctgaccggcctcatgaattgagggaagtgggggcgcctcaggcgattaaccagcattttctgttcggtaactttgttaagtttttcacagactcggctctgcctgaggaaaatcctcaaatgctgagctatatcagaacattggccggcagagccgtaagtgaagccgggaagcgcccgatggggccagtccatatcaatgtgccgctcagagagcctttgatgccggatttatcagccgcaccttttgaaagaatgagaaaggggcggcacgtctcagtcacaacagggattcagtcagctgatcaagattctctctgtcatattacagagcgtcttgcggggaccgaaagaggtatgatcgtctgcggcgaaattcacggtgaagcagaaaagcagcaaatcatcgcgcttgccgagatgcttcagttcccgattttggctgatccgctttcaaacctccgaaacggggagcatgataagacgctgattattgatgcttatgactcgtttttaaaagatgaagaaataaaagaggcgctgcgtccggacgctgtgatccgcttcggcccgatgccggtttccaaaccgctctttttatggctcagagatgatcctgccattgagcagtttatcgtcgatgaagacggaggatggagagatcccacccaggccggcgcgcatatgattcattgccatccgtctgtgtttttggaagcggtccgttcagctgaaaccggaaagcggccgtccggatggtttgagaaatggcagtttgtcaatgaccggttccggagtcatttacaggacgcaagcatggatgatttatcatttgaaggaaatgtatatcgtcagcttcagcaccttgtccctgaaggcagttcgatttttgtcggaaacagcatgccgattcgcgacgtggatacgttctttgaaaaacaagatcgctccttccgtgtttatgccaaccgcggcgctaacggaattgacggagttgtctcctcggctatgggactgtgtgagggtacaaaagctcctgtcacgcttgtcattggagatttatcgttttaccatgatttaaacgggctgttagcggctaaaaaacttggaattccgcttacggttattttaataaacaatgatggcggcgggattttctcgtttttgccgcaggcatctgataagactcattttgaagaactgttcggtacgccgacgggtcttgatttccggcatgccgccgcactgtacggcgggacgtatacttgccctgagacatgggaggcatttaaggatgcgtatcagccgcaggcggacaagcccggacttcatataatcgagctgaaaacagatcggacatcaagagttcaattccatcgcgatctgctgcaggccgcagtgcgggaagtgaaaaaagaatggaaactgtaacagttaaaacggccgacggcgtatgctatcgtgctgctgatagcggacacgaatcatctgaagctattgtttgtctgcatggatttacgggcagcaaagaatcatggatgtttttacgcggcatgtttcccggcgaacgaatggtgatgattgactgcctgggtcacggggagacagacgcgcctgtgcaagcggcaaggtacagtgcgagccggcaggttgcggaccttgccgccgtttttgatcaattaaaacttcacaaagtgaaacttattggttattctatggggggaagacttgcgtattcctttgcacaggcatttccgcatcgggtgtcagcgcttgttttggaaagtacaaccccgggcctcagcacgcttcaggaacgcaaaaagcggattcagtcagaccggaagcttgctgactttatattgcgggaaggtataacatcgtttgtcgattattgggagggcattccgttgtttgccacgcagctttctctgccggacagcgtaaaggcgtccatccgtgccggcaggctgaaaaataatccgtccggacttgcaggcagcctgctcggaatggggacgggctcacagccttcctggtgggaggcattacaccgcatcaaagcgcccgtcctgctcatatgcggtgaatgggatgaaaagttttgcgctattaatcaaaaggtgcataacctgctcccatcaagtaaaatagaggttgtcaaacaggcggggcacacggtacatgtggaacagccgcgaatttttggtaagatagtaagtgagtttttatacggcttgtaaagcataaagaaaatagcttttcggccggactcaggcaaaaatgaaggaggtcatatcaatggctgcagaatggaaaagtgaacgtcagtacgatgaaatcctgtacgagacgtataacggtattgcaaaaataacaattaaccgcccggaggtacataacgcatttacccctaagacggtatcagaaatgattgacgcgtttgctcgtgcgcgtgatgactccaatattggtgtcatcgttcttgcgggagcgggagataaagcattctgttcaggcggagaccaaaaagtccgcggtcacggcggatatgtcggagacgatcagatcccgcgtctgaatgtgcttgatcttcagcgtttgatccgcgtgattcctaaaccggtcgtagcgatggtatcaggctatgccatcggcggaggccatgtgcttcatatcgtctgtgatttaacgattgcggccgataacgcgattttcggccaaaccggaccgaaagtgggaagctttgatgccggttacggctcaggttacctggcgcgtatcgtcggacataagaaagcccgtgaaatctggtacctgtgccgtcaatacaacgcgcaggaagcgctcgacatggggcttgtcaatacagttgtcccattagagaaacttgaagaggaaacaattaaatggtgtgaagaaatgcttgagaaaagccctacagcccttcgtttccttaaagcggcatttaatgcagatacagacggcctcgccggaattcagcaatttgcaggagatgcaacgcttctttattacacgactgacgaagcgaaagaaggccgcgattcctttaaagagaaacgcagtcccgatttcggtcagttccctcgttttccgtgatcagatgacactacgaaacagcttgagccgctctggtccaagctgttttcttttcaaaaacagtacttttacctcggagatgataacatgctgacagaacagccgaattggctcattcaaagggctcagctgacaccagagagaattgctctcatatttgaaaacaaacagatgacattcagagaattatatcatgcttctaaacaaatggccgcgcggctgtataaatactgctcgcttaaaaaaggagaccgcgctgcgattttgctttctaacagaccggaaatggtttatgccgttcacgcctgcttcttattaggggcggaagctgtgctgttgaatacgaagctctcaaaacaggaacggttgtttcagctcgaagattcacaggcaaagcttttattgacggaggacggtttttgccgcgaagaatatgaatctgcggtcgccgctgcagatgtggacgagctgcaggctgaagaggcgggagacattgaacctgaagcttatgtaacgcttgatgatacggcgactcttatgtatacgtcaggaacaacgggaaggccgaagggggtgcagcagactttcggtaatcattattccagcgctgtatcgtctgcgctgaatctgggggtcacggagcgggaccgctggcttattgcgctgccgctgtttcatatcagcggtctgtctgcgctgtttaagtcggtcatttacggcatgcctgtcgtgcttcatcaaaaattttctgtcactgatgtgctggacagcatcagctcccatcaggtcacgatcatttcagcggtgcagaccatgctttcgggcctgcttgcggaaactgaacaatgtcctgaatcactgcgctgcattctgcttggcgggggtccggcaccgctgccgctccttgaagaatgccgcaggaaacaatttccggtattccaatcttacggcttgactgaaacctgctcacagattgtcacgctttctccggaattcagtatggacaagctcggctcggccggtaaaccgctgttttcatgcgaaattagaattgaaaaagacggaaacccttgtgcgccgtttgaacacggtgaaattacggtgaaaggcccgaatgtaatgaaagggtattaccatcgtgacgacgcaaaccaggccgcttttcataatggatggtttaaaacgggcgatcttggctatttggatgatgaagggtttttatacgtgctggacaggcggtcggacctcattatttcaggcggagaaaacatctacccggcagaagtggaagcggcgctgcttgcccatccggctgtagcagaggccggtgtttcgggagccgaagatccgaagtgggggaaagtgccgcatgcttttctcgtgctgacttcttctgtcagttctgaggagctgaccgccttttgccgtgagcggcttgcaaaatataaaataccggctgcttttttcgaggttgacgggctcccgcggaacgcgtccaataaactgatgaggcatcggctgaatgagcttcgtaaaggagaattatcatgattaagattgaaaaaatcaccctttatcatgtaagtatgaggctgaaaaaaccgtttaaaacaagtattgaaacgctgcaggatcgtaaatttttgatcgtggaagcgatcgatgaaaccgggagaaccggctggggggaggtatcggcgttttcttctccgtggtatacagaagaaacgattcagacatgcgcgcatatgctgagagattttttcatcccaaatgtcgtaggccgcgagtttttccatccgtcagaagtgcctgacagtctcgcgcgtttcaaaggaaaccgcatggcaaaagcggggctggaatcagccgcgtgggatctatatgccaagaaaaaggggatatctctcgcagaagccttagggggcaaaagagataaagtgcccgccggcgtggcggtgggtctggcttcggctgatgagatgcttcgggaaattgagcaatacgtaaaagaaggttatcaacgtataaaaataaaaattcagcccggccatgacgttgatctggtcagagccatccgcagccgttttccgaacgtaccgctgatggcggatgccaactcggcatatgaactgaaagacatcagcaggctgaaagagttggatgaattccagctcttgatgatagaacagccgcttcaagcagatgatattgtcgatcaccgccacctgcagaaacacttgagaaccgcggtatgccttgatgaaagcatatgctcatatgatgacgcaaggcgggcgattgagcttgggagctgtaaaatcattaacataaaaccagcgcgtgtaggaggcctgacagaggctttaaaaatacatgacttatgcagagagcatcacatgccggtttggtgcggcggaatgtttgaaaccggcatttcgagagcgcagacagtcgcgctcgcttcgctgccgcaatttacgataccgggtgatatttcctcatcagaccgatactgggaggaggatattgtcactcccgacatacgtatcgaagagggattcatctctgttccggacggtcccggactgggtgttgaagtcaatcaggaaataatgagaaaatacgtcacccaaatggacgtttttacgacaaacaactgataaaaagacatttcagcgagttgagctgcctgtatgctgctgttatattgaaattgttcatcatcaccccttcccccgtttgaaccggctgtatcagccggtttttttaataggcgaatgcgatgatttttttattcttcaaacagtgtcggctttacatcgcaggtgttgctttctggctggggcaaagatgtacatcttgataaaaaattctgtgcttgtcatgaatgcgatactgatcgtaccgtctgccgcctatatttgccgacgaaccgcctttctgccatgcttctcatccgcgcgattttctccggctcaggggctgatttcaaaaaggcttgcggcgcggaaatgaaaaagagctgtataaaacagctcttttcttttataaatcatgcggtttaaaggttttgcaatccgtttcttcacttttttcagcggtttcgcctgtatggctgactacataaatagcgtcggccgtgcatttgtttcctctgccccaatatgaacagttattgacttcacacagaattttttggtccatgctggctcccctccaagataaaaggtacgccattagtatgagccgccctgatttttgttattcctcctggcggatataacgtctgtctttcataaagagcttccagaagaaataaaacccgggaaacaaaataatgaaagcgacgatatacgtcataaacagcgccctgaaggtggccggctccgtaaatcctgacatgaccgtaatatccggataaatcatataaggaagatgcgcccgtccgtatgcatagcttgccagaaagtattgaagcgcaatggcgatcatggcgattctcggtttgccgaggttgcggccgaagcgcttattcggcaaaaacagagccacgccggcaatgataaatgtaatgacagacagaatgagccatgtcttgtctttcatcatccccgtatacagccagccggcttcagagcgtaatgtcagcataatgaagaaggcaaaaagaagcgacagcggccctgttagtaaagagctccgtctgtagatgcggtacgcatgctcctcttccgcaacatttgaaaaatcggccagaagcagtgaagataaaaataaagtgcttaaaatggcaaagccgataaacgcatacgcattaaggcttgtaaagacatttgccaaattcaggtgatacacgccgcccgtcttctcaataaatcctccgtgtgtgaccggaaggaccaaaatcagcacagcgggaataatgaagcccgaaattccggagatatatctcatgatttttctttccttcgccgtattggagaaaacgagaaagccgctgcggatggctaaaagcagcaaaataatactccccgggatcaataaaacggttcccagcacgaaggttgcccctggaaagaagctgaatagggcgacaacgattgcgacgataaagacgttggtcacttcccatgtcggggacaaataacggttggcgatgtttgtcgcctttgtttgttctttatttaaataaatcatcgaccaaaagccggctccgaagtccatcgttgccatgaccgcgtagataaacacgaagccccatacgattgatatcgcaatgagagcatccatggtaatgtccattttaattcagccctttctatagttaggattccgccgcttttacatcctcctcaacgggatgtttgcggaaataataaagcagcacataaatgactgcagctgccaaaatggcgtaaacgaccgtaaacaggatgaacagcaaaccgattgaaccggttgtcgtgacgacatcagacgttttcaagagatggtaaatcacccatggctgccgccccgtacaagcgaatatccacccgaattcaattccgatcagactgagcggtcctgcggttaaaaataaaatcaaaagccaagtcggaaagctgtctttctttaaaatttttctccacacgatgccgatgattgagtacaaaatgagcagcatcccgatgccgaccattccgttaaacagtgtatggatgaataaaggcggccactcgtctttcggaaacgcgttcaatcctttgacgacggtatcaaagctgtttgcagccaaaaagcttaaagcccacggcacttctatcgcccattttactttttcttcttttgcatcagtaaaacccccgatcgcaagcggagcgtgtgatctagtttcaaacagcccttctgcgcccgcaagcttctcaggctggtattcgtaaagaagctgggctgactcgtgaccgtttaaagaggcaataatggagaatatcccgccgatcgttaaggcgagcagcagcgcttttcggtgaaagcggtatacctgctcctgttttctcgttctcagcattttataagccgcaactgacgcaacgataaatgccccggtcatgaaagccgtcagaacgacatggcccgcggtggtgaaaaagcttggattaaaaaacgctgcccacggttcgacgtcagtgattttgccgtttaaaattttaaagccggccggcgttccttcaaatgcgtgaacatttgtgattaagacggcggatgccgcggcgccgatcaaaacgaaaattacggcaatgatgcgcatcgccggagtcagccggtcagcggcgtagacataaatggacataaacagcgcttcgataaagaatgcataaatttcaatctgaaacgggagtgacatcaccctgccgatgacttccatgaatccgggccacaaaagggcaagctgtgtacccgcgatcgttccggtcggtatcgccacgccgagcagaacagcctgcgccttcgtccaccgttttgccataatggcataatgcggatcttttgttttttggtaaatcaattcagccattaaaatcatcagaggcaagccgacaccaagcgtcgcaaaaataatatgaaagcccatggttgtaccgaacagacttctggctaatactaaatcatccacgatcataaaccgcctttctaaattaccgttttatgtaatgtggttatattatttgctgaagcgattagattattcttccgattccatatatgtgcagggtttagaaatcaggggatcagggcatatatgattgacaagcggatatttaaggtttaaaataaaacgtaattattacgatttgagaaagggagatcagcatgaaaaaagatattcatccggataaccatcaagtgatttttcaagatgtgaacagcggctatcgctttttaagccattctacgaaaaaatcagaggaaacagcagagtgggaagacggaaagacatacccgctgattaaagtagaggtcagctcagatacgcatccgttttatacaggccgccaaaaattcaacgaaaaaggcgggagagtcgaacagttcaacaaaaaatacaatatggggaaataagacaagcccaatggggtttgtcttatttattgagcactttgtcatctcgtgcggggagtgacgaaatgacccgtcttatgttatattgtgaataaaaaagcagaaaggaaacaccaagatgagtcttctaaacgatatcatgcaatttaatgagcagttcactaaaaacaaagattatgaaaaataccaaacatctaaattcccggataaaaaaatggcgattttgtcctgtatggacacacgtcttgtagaattgcttccgcatgcgatgaacatgcgaaacggcgatgtgaaaattattaaaagtgccggcgcgcttgtcgcccacccgttcggaagtatcatgcgcagccttttagtggccgtatacgaattaaacgccgatgaagtctgcgttatcggccaccatgattgcggcatgagcaaaatcaacagcgaggatatgctcgataaaattatcgaccgcggtattccgaaagagcggattgacatgctgaagcactcaggagttgatcttgatcaatggctgaaaagctttgattcagtagaagcgagtgttacagacagcgtaaacgtcattaaacaccatccgctattccctgacaatgtgccggtgcacggtctggtgattgatcctgaaaccggtaaacttgatctggtgatcgacggctaccggcatatggactaatgtttttgttttttgtccggtacgggatcaacaccgcccggatgaaaagggtggcactttaaaatccgcttcagtgtcagccatccgccttttaatgcgccgtgagtcttgacggcttcgattccgtactgcgaacaggtcggataaaagcggcatgacggcggcgtcagcggagagatgaacttctggtatccgcggattaaagcaatcattatggttttcatcaaaaaaccgcctttctgatgctagtatagaaaaaaaatttcagattgaaaagcttccgccacaattcttatcggaaaactgtgttataatggatgcatattctgaaaaaaagggagtgccattatgccttcagtagaaagttttgagcttgaccataatgcggttgtggctccgtatgtaagacattgcggagtgcataaagtcggaacagacggcgtcgtgaataagtttgacattcgcttctgccagccgaacaaacaggcgatgaagccggatacgattcatacgcttgagcacttgcttgcgtttacgattcgcacacattctgagaaatacgatcacttcgacatcatagatatctcaccgatgggctgccagacaggctattatcttgttgtcagcggcgagccgacagcggaagaaattgtagacctgcttgacgctacgctgaaagaagccatcgatattacggagattccggcggccaacgaaaaacagtgcggccaggcgaaacttcatgatttagaaggcgcgaaacgtctgatgcgtttctggctgtcacaggataaagaagatttgctgaaagtgttcggataaaaaacaggcctttttgctgacatgcaaaaaggcttttttacatatttctaaaaaatgtcacaccttatgtgtaagcgtttgctaaaatagaagcaaacatgaaggagtgatgggatgaaacgggctgtattggcaggtatgtgcggtatggtatttctattatcttcctgcgggggcaattcggataaaacctccgcggatgaagagcctaaagcgcttgaggtcaagcttacaggaccggaaacggcagcaccgcatgaaaaaacggaatacaaggcggaggttttttacggcggcaagcgtgtcacggatgcggatgaagtcatgtttgaagtatggaaagaaggaaaaaaaggcagcagcaaaacaagcaaggccaaggaggaaaaaggggcgtatcacctgcggactgaatttgatgaagagggtgtgtataccgttcaatcccacgtaacggcaaatcagcagcataatatgccgactgtaaaagtgcgtgtcggggatgctgaagctgccgatgattcctccggctatgaggaacagacgcatcatcattaaggattttttttatccgtcaagccttttgatgcgtcctccggcgggtcaatcgtatgttttacattataagctcttacagtcgaccagatggataaaagcagcacggcgagcacgataagaaagccgaagctcagaagaagcaccatgaaatccctcctttttaacaaatcataacatattttccatccgtaaaaccaagggctaaaaatttatgttttaacacacgatatatagggtatatcaatagtaaaccaaaggaggaagataggcatgtcagaaaaactattggacgcagtcaataagcaagttgcaaactggacggtcatgtatgtgaaattacataactatcattggtatgtcaaagggaaggactttttcacattgcatgaaaagttcgaggagctgtataacgaaacggctacatatattgatgatctggcagaacgtctgctggcattaaacggcaagccgatcggcacaatgacggaatcattgaagacagcgtctgtaaaagaagcggaaggcaatgagagcgcagaacaaatggtacagaacatttatgatgatttcactgtcattgcggaagagctgaaaagcggcatggatctcgcagatgaggtaggagacgaaacgaccggtgatatgctgcttgccattcaccagaatatcgaaaaacataactggatgctgaaagcgtatttgggataatcaacaagggaggaccggggctataaagcactcggtcttttatttggctgccgaagagaggtgttgtccatttttctgaaaaatccagtccgttccattcacttttcatagaataatgtaaggccgtttctgtgaaaggatgttggatcaagtgggcaaagactttggcatcttttcgttttttgcagtgatcgtgtcggcagcggggtttttcttcggaggttttcagtattcgtttctgattttgctatcggtcatggcgattgagtttatcagtacaagcttaaaagaatctcttttgcagcagctgagcgcaagaaagctttttgcgcggctggtcaaaaaaatcgtgaccctggcattagtctcagtttgccatttttttgaccagctgcttcataccgaaggcgccatccgtaatttggctatcatgttttatatcttatacgaatcggttcagatcgtgattacggcaagctcgctgggcataccggttccgcaggtgcttgtcgacctattggatactttgaaaaataaattcaagcgcaaaccgtaacatttgcttcaaaggaggctatactagcgggtatgatggttttcctctgaatttttgataaagggcttccgaacaaacgcaactgtggtatgatgtatggaagatatgaaggaacggattagagggataaacatgtacgagtttaaagactattatcagaacactgttcagctctcctttgaacaccagcctttttcagacagcccgaagcacgtgtgggtcatatgccgatatggagataagtggcttttgactgagcacgaagaccgggggtttgaatttccgggcggaaaagtggagccgatggaatgtgcggaggaagcggccctgcgcgaggtgaaagaagaaaccggtgccgcggtaagacatctgaagtacgttggacagtataaagttctcggcagggaaaaggtaatcgtgaagaatatttattttgccgatattgaaaagcttgaaaaacaggctgactattttgaaacaaaggggccggtgctgttcagcgaactgccggagaatctcccgcgaaataaaaaattcagtttcattatgaaagattcggtgcttccgatcagtctgaaaaagctgaaagaggacggcgtatttcaatcataaaaaacggagacccggcgtttacgcacgggtcttttttaaatttttcctttcgtccattttctttctaacagttcgactccctgatacatcaatgtcgcaaaaattgcgatgatcagaaggcttaagaacacaagagtgaaattgaagacctggaatccgtaaatgatcatgtagcccagacctttttcggaaacgagaaactcgccgacgatgacaccgacccaggataaaccgacgttcactttaagcgcggaaataatcgcgggggcgcacgccggcagaatgacttctttaaacatgatgcttcttttcgctccgaaggttttcatcaccttaatatagttttcatccacttcctgaaaagccgtaaagacgacgattgtcgtgataatgacactgatgactgctcccatggcgacaatgcttgtgaaattcggtccgagtgccacgatgagaatcggtccgagtgcgaccttcggcatcgcgtttaaaatgacgaggtacgggtctaaaacccgggcgagcctgtttgaccaccataacagagcggcgaggcatgtgccgaggagcgtgccgagcaaaaagccgagaacggtttctcctaaggttacgccgatgtgcgccgcaagggatccgtccgcaatcttttcaactaaaagcctgcaaacggcggagggtgagctgaagattaacggatcgatccagcccgccctgctcgatatttcccatccggcaaaaaatacgataaaaatggcggcctgatacgcacggatccggagcttttctttttggtgtcttttcttaaactgctgatgaagctgttcaatcgtgccgctgctgtttttcaagggaattcagctccttccatatggtttgaaacagcggctgaaaggccggatcctgacgcgcgtcaaacggatctaaagccgcgagctccttaggcacggtgaatatttggtggatggtgcccggctgattcgaaaataaatagatcgtatcgctcatggcgatggcttcaccgatatcgtgggtgacgagcacggcggttttttgaaaatcctttaatgttctgaagacaaggttttccaaagaaagcttcgtttgaaagtccagcgcggaaaacggttcatcaaggagcagcagtcccgggtccggtgcaagagttctgacaagtgccgcccgctgccgcatcccgcctgacagctctttcgggtatttcttttcaacgccgattaatccgagcttaggcagaaggctgagaacttcagctcttttttcttctgttaatgtttttgaaatgtgtaaaccgagcagcacgttttcctcaattgatttccaaggaaataaataatcctgctgaagcatataaccgatttggtgttctttatggttcggcacgcttccttcaatcagcacccggccttgcgcaggagtaataaggccggccagaatggacaggagtgttgtttttccgcatccgctcggtccgagaaaggagatgaaatcccctttttcaatctgaaaatgtatatctttcacggcggttgtcttttctttcagcgagaaataagtatgtgttacatgatccacatgtaaaaaagacattcatgttcctcctattgttctgaggtgacttttttggcgatttttgtgttgacgagtttgctgtacggaatgtgtttcgggagctctccggcttcatccataatagattgaagctgttcccattcatccttttgcagaactgggtctgcagagaatgacttttgttttttatatcgctctattgatgtttcgataatggccggatcggtatcggcaaattccttctgaatcgtttttgcgatgtctttggccggatggctttccacccattgctgggcgcgatagatggcgcgggtgaatttttccgccgtcttttcattggttttcaaataactttcttttgccataaaggttgtgtacggcatttggccggaagcttctccgaaggatgcgacgatatggccgatgccttctttttcaaattgggatgccgtcggttcaaacagctgcacataatcacccgttccggatgcaaatgcgttggaaatattggcgaaatcaatgttttgaacgaggttaatgtcttttttcggctctatgtgattctttttcaggacgtactcaccggccatttggggcatgccgccttttcgctggccgagaaatgtttttccttttaaatcgctccatttgaatgaattctcatccttccgtgacacgagaaatgtgccgtccgtctgtgtcagctgcgcgaagttgatgaccggatcttttgctccctgcgcctccacgtaaatggatgtttcagaaccgatcagcgcgatgtctgacccgtttgacaaaagcgatgtcattgttttgtctccgccccatgttgtttgaagtgacacttggagcccttcttttttaaagaaaccttttgcttcagcgacatacagaggcgtatagaagatggagtgtgtgacttccgccacctttacctttgtcagactttcttcctgtctgcaggccggaagaatgagcaggaaaaaggcggatatgacaaaaacgcagcccgttttgagccatttgttcacggtgtaacctccttgttttaagcgttaaataaccttttctgctttacatatcgtatgatgggtataaaaaatgtgtgagtgcccatattcacgttgggaaagaataaaaaaactgatgatataaggaggccattgttttgctggtagaaaagaaaaggttcccgtctccgagtccgcatatccgcctctttgaggtatgctatgagtcagaagggctgaaggtaaaggggcttcttgccgagcctgcggcgccgggaacatatgacggttttttatatttgcgcggcggcataaaaaatgtcggcatggtacgccccggaagaatcgttcaattcgcttcccaaggctttgtcgtgtttgcgccctattacagaggcaaccagggcggcgagggaaatgaagattttgcgggagaggacagagaggacgcgttttccgctttccgcctgcttcgggagcatccgaacgtcagggaagggcgggtgcatattttcggtttttcccggggcggtatcatggggcttttgaccgcgattgaaatggggcatcaagcggcttcgctcgtatcatggggcggtgtgagcgatatggtgcttacttatgaagagcggaaggatatgcggcggatgatgaagcgggtgatcggaggcacgccgaaaaaggtgccggatgaatacagatggcgttcaccgtttgaaaacgcagaccgcattcaggcccctgtgctgctcatccatggagagaatgatgagaatgtttcgatcgaacacgcccgaatgatcgaggacaagctgaaagaggcggggaaaccggtggaaacttggtattacagcggttttacgcattattttccgccgcaggaaaacagacgcattgtccggcggctggcggaatggatgaagacacggtaagatgcctgatttatgatatgataataaagaataagagaatgaaaggggattttcattttgggaatgcctgttgaatttaataccatgattgtgacaaaaggcaatgaaaaacggatagaggaaaatatctttttattggagaaagagggctaccgcgtctatcctcttgatattccgatggacgtgcgcaaaacgaaaaccggcgagaaatccggcaccggcgaggttcaaaagctcgaatgggcgaacggccggacaagcattacatacagactcacgtcgctccattcgacaaactgaaaaaacaaaagccaagggcataaacgcccttggcttttttgattacacgagaggtccgccggctttggcaatcgagtctgcatgggaaaactttttaaagttttctttaaactcattggctaaaaacagcgctttttcgttgtatgcttgtttatcgctccatgtgttttcaggctgaagaacttcatccggaacgcccggaacatgaacgggactgcgcaggccgaaaatgctgtctgccgccatgtcagtctggttcagtctgccttcaatagcggccttgaccatcgctcttgtatacgaaagtttcatccgttctccgactccgtaccctccgccggtccagcctgtgttgaccaggaagacttgaacgccgtgttcgtcgattttatgcccgagcatttcggcatatacatgcgccggaagcggaaggaacggtgaaccgaagcacgtcgagaaagtcgtttgcggagatgtcacgccgcgctcggttcccgcgagtttactggtgtacccgcttaagaagtgatacatcgcctgttccttcgtcagtttgctgatcggaggaagcacgccgaatgcgtccgccgttaaaaagacgatcgcctgcggatggccggcaatgctcggctgcacgatattgccgatcatctcaatcggatatgcggctcttgtgttttccgtgtagaaggaattgtcgtaatccgcttcacccgttttttcatcaagcacgacattctcaagaacagacccgaagcggatcgcacgaaaaatctgcggttctttttcctcgctgagattgatacatttagcgtaacatccgccttcaatgttgaaaacgccggaatctgaccagccgtgctcgtcatcgccgatcagtttgcggtccgcatcggctgaaagcgtcgttttccctgtgccggaaaggccgaaaaacagggcgacatcgcctttttcaccgacattggctgagcagtgcatcggcagtatatcctgctgcggaagcaggaagttcataatggagaatattgattttttcatttctccggcgtattcggtgccgccgattaaaatgacgcgcttttcgaaagagacaatgataaatgtttccgaatgcgtgccgtccgtctccggatctgctttaaaatgcggagctgagagaatggtgaaaggctgcgcttgcgtgtctctttcatccgtctccggtctgataaacagctggcgcgcgaataaattgtgccacgcaaattcatttacgaccgtaatcgggagtctgtatttttcatccgctcccgcgaatccttcaaatacaaacagttcatcccgctgttttaagtagctgacgactttggcgtacagcttttcaaacgcctcttcagaaatgggctgattcaccgcgccccaatcaatttgattttctgtgctttgttcacggacgataaatttatctttaggtgaccggcctgtatatgcgccggtggtggcgcgtacggcgcccgttgatgtcagcgttccttcatttcggctgatcactttttcggtaagttttggagctgataaattatgatgcacattcggacttgcaagtaatgcttgaagatctgcggttaaatcaactaatttcataaaaaccttcctttgccggtttatttgtatttcgctgaatgtggaattagtataacatatatctgaaaatagtctatactatttgcggttttttgtttgtgtttttccattgcttcccgaaataaaggcgcgtaatcgctttaattcatattgacactttccgcccttttacgataagatatttcattgagcggatactcttatcccgagctggcggagggacaggcccgatgaagcccagcaaccggtttctctgtaaaaaagcaggtgaaaacactgtgggaaaccaaggtgctaacctgatgcaaggtttaatattttccttgagcgataagagtgaaaggcacacagaccaaaccctttcctcgagtggaaaaggtttttttatttcataaaatatgccaattaacattctctgatatagtatgacattgtattaagagggagcgagttccgtatcatatgaaaaggtcttgcaaaagatcttttttcaggaggaaaagtgaatgagtaaaaaccgtcgactatttacatctgaatctgttactgagggtcatccggacaaaatctgtgaccaaatttctgacagtatcttagatgagattttaaaaaatgacccgaacgcgcgcgtggcctgcgaaacatctgtaacgacaggacttgtgctggtaagcggagagattactacatcaacatacgttgacattccgaaaacagtccgtgaaacgattaaagaaatcggctacacacgcgccaaatatggatttgatgcggagacttgcgctgttttaacatcaattgatgaacagtctgcggatatcgcaatgggtgtcgatcaggctcttgaagcgcgtgaaggcacaatgagcgatgctgaaatcgaagcaatcggagcgggagaccaaggcctgatgttcggttatgcgtgtaacgaaacgaaagagcttatgccgcttccgatctctttggcgcataaattagcccgccgtttgagcgaagtccgcaaagaagacattcttccgtaccttcgccctgacggcaaaacgcaagttaccgttgaatatgatgaaaacaacaagccggtccgcatcgacgcgatcgtcatttcaactcagcaccacccggaaattacgctggagcagattcagcgcaatctgaaagagcatgtcattaatcctgtcgtgcctgaggaactgatcgatgaagaaacaaaatacttcatcaaccctacgggacgtttcgtaatcggcggacctcaaggtgatgcgggtctgaccggccgtaaaatcatcgttgacacatacggcggatatgcacgccacggcggcggcgcattctccggtaaggatgcgacgaaggtagaccgttctgcggcatacgctgcgagatacgtagcgaaaaacatcgtggcagcaggtcttgctgattcttgtgaagtgcagcttgcatacgcaatcggcgtggcacagcctgtttctatttccatcaatacatttgatacaggaaaagcttctgaagaaaaactgatcgaagtcgtacggaataacttcgacctgagaccagccggcattattaaaatgcttgatctgcgccgcccgatctataagcagacagctgcttacggccacttcggacgtcatgatgtggatcttccttgggagcgtactgacaaggcggatgcgcttcgcaaagaagcactaggagaataattttatagccgcttacttaagcggctttccctttttgtagatgctgccatgcttattttttacatagcgtgaaaccaatggcgtaacaaagcgtctataaaaagggggtccaattagaaaattacacttatggaggctatactatgtgtggatttgtcggtgtttttaataagcatccattaactcaaaccgcagatcaagaagagctaatcaaacaaatgaaccaaatgatcgttcaccgcggtcctgacagcgatgggtattatcatgacgagcacgtcggattcggcttcagacggctcagtattattgacgtagaaaacggcggacagcctttatcatatgaagacgaaaaatattggatcatttttaacggcgaaatctataactacattgaattgagagaagagcttgaagcgaaaggctacactttcaatacagattccgataccgaagtgctccttgcgacataccgtcattataaagaagaagctgcttcaaagcttcgcggaatgtttgcgtttttaatctggaacaaagctgaccgcgtcatgtacggcgcgagagacccgttcggaattaaaccgctgtattacacaaccatcggggacaaagtatattttgcatctgaaagaaaaagtttaatggccgctcaaaacggcattgatcttgatacagcttctttacagcaatatatgtctttccaattcgttcctgaaccgagcacgcttgacgctgaagtgaaaaaagttgagccgggcagccagtttacgatccgcccggaaggcgacatcgcgtttaaaacatatttcaaagcgaactttaagcctgttcagtctgatgaagataaattggtgaaagaagtcagagacgcaatctttgactctgtcaaagttcacatgagaagtgacgttcctgtcggttcgtttctatccggcggtatcgactcttcttttatcgtctcagttgcgaaagaatttcacccgagcctcaaaacattttccgtcggttttgagcagcagggcttcagtgaggttgacgtagcgaaggaaacggctgccgcgctcgggattgaaaacatcagcaaagtcatttctcctgaggagtatatgaacgagcttccgaaaatcgtctggcactttgatgacccgcttgcagatccggcggcgattcctttgtactttgtcgcgaaagaagcgaaaaaacatgtaacggtcgcgttatccggggaaggcgcggacgagctgttcggcgggtacaatatttaccgcgaaccgctttcgcttaaaccgtttgaacgcattccgtccggtctgaaaaaaatgcttcttcatgtggcgtccgtcatgcctgaaggaatgagagggaaaagcctcttagtccgcggctgcacaccgcttgaggagcgctatatcggtaatgcgaagatttttgaagagcccgtgaaaaaacagctgctcaaacattacaatccagagctttcataccgtgatgtcacgaagccgtactttacggaaagccgttcatacagcgacattaataaaatgcagtatgttgacatccatacgtggatgcgcggcgacatcctgttaaaggctgacaaaatgacgatggccaactcattggaactgcgcgtgccgttccttgataaagtcgtgtttgacgtggcttctaaaattccggatgaactgaaaacgaaaaacggcacgacgaaataccttctgcgcaaagctgctgaaggggtagtgcctgatcatgtgcttaatcgcaaaaaactcggcttccctgtgccgatccgccactggctgaaaaatgagatgaacgaatgggttcgcaacatcattcgtgaaagtgaaacagatgcttatattgaaaaggattatgtccttcagcttctggaagatcattgtgccgacagagcggacaacagccgcaaaatctggaccgtgctgatctttatgatctggcacagcatcaatgttgaaaaaagactggtgccggaagagctgaatcatcagccgaaagaagtcattttcgtttaatccaaaaggctttcgatgttatcgaaagccttttttctattgttttttttgtaaaccgtctattccgctctgttttcgacaaagtattacgcaatattcagaaaaaggttataataggactaatcgggtagattccggaaagtgttttctggctatttcgtctcggtttgttgtttctttgtcaaaatcagggggagggagagttatgcaaaacaaagaaaaaacgcttcaccgcggcttggaagagcggcatatctcgcttatgtcgttgggcgccgcgataggagtcgggctgtttctcgggtcggcttctgccataaagcttgccgggccggggattttagccgcttacgcctgcagcggactgattatgttttttattatgcgggcattaggggaaatggcgattcaaaagcctgtagccggctcattcagccggtatgccagagattacctcggtccgcttgccgggtttttaacaggctggaattattggtttttatgggttgttacctgcatggccgaaatcaccgcggtcggcatttatatgggctactggttccctgacgtgccgtcatggatctgggcgctttgtgcactcgtcattatgacggctgtcaactttctggcggtcaaagcgtacggtgagcttgaattctggtttgcgctcattaaagtcttggcgattctgtcaatgatcgcgatcggtctggtgatgatcgtattcggtctcggaaacggaggcgttgcgctcggaatcagcaatttatggagccacggcggctttttcccgaatgggattaaaggggtgctgctgtcgcttcaaatggtcatgtttgcctatctcgggattgagctgatcggtgtcacagccggtgaggtcaaaaatcctgaaaaatcactggcgcgtgccatagatactgttttttggcgcattctcattttttacgtcggagctttgtttgtcattatgtcaatttatccgtggcaggaaatcggttcaggcggaagcccgtttgttttgacatttgaaaaaatcggaatacctgctgcagccggaatcattaattttgtcgtattgacggcggccctttcttcctgcaacagcgggatcttcagcacggggcgcatgctgttcaatctggcggaacaaaatgaagcgcctaaagcatacggtacggtcacaaaaggcggtgtgccgggaaaagcggtattggtttcagcgggcgcgttatgcatcggcgttttgctgaactacgtggtgccggcgaaagtgtttacgtgggtgacgagcattgcgacgttcggtgcgatttggacatggtcgattattttgctttcccaaatgaaataccggaaaagcttacagcaagaacaacggaaaaaactgaaatataaaatgcctttataccccttttcctcatatatctcattggcatttctcgcttttgtcgttgtgctgatggcttttaatgcagagacccgggtggccgtcatcatcgggcctgtctggttcggcatattattagccgcctattacgggaaaggtttccataaaagaaaagacataggtctggaaaacggacagacattcgccgaaaaagcgtaaaaaaagagcccgggacatgggctctttttttcataggatcgggccggcggggaagaataaaacaaattcctgaacattttgcttctgtttcctgacaatcgggagaatgcaaatggtttttacttaaataatattttgaaaaatggtacagtaataaaacaaagctgatcttttttatttctcttgcagtgttttatagtatcggcctttttcaacatattccgttctgattctttccatgtcccgtatgtcttcttctgtcagccggcggataacctttgcgggccggccgaacgcaagacagccgggaggaatggttttgcccggaggaacgagacttccggcgccgataaacgcgccttctccgatttccgccccgtcaagaatgacggagcccataccgattaaagcattctttttgatgattgcgctgtgcagtgtaacctgatggccgatcgtgacgtcatcttcaataagaagcgggcggttcggactttgatgcagacagctcaagtcttgtatgctgactctttttccgatccttgtcggcgcaacatccccccggatgacggctgagaaccaaatgcttgattgttctccgatcacgacgtcgcccgtaatgacggcgttatccgcaatgaacgcttcagaatgtatgtcaggcgtaaattgtttataagggtagattatcatgtctcatccttctttctctaaatttatgtaagaggtgaactgcatgtggacttggaaagcagacaggcccgtcggtaccattgtcattatccacggggcaagcgaataccacggacgttataaatggctcgttgaaatgtggagatcttccggatataacgtggtgatgggcgatttgcccggtcagggaacgtcgacccgcgccagagggcatattcgctctttccaagaatacattgatgaagtagatatatggattgataaagcgagaacgcttgaagcgcccgttttccttttgggccacagcatgggcggactgattgcgatagaatggtttaagcagcagagaaatccccgcattacggcactcattttatcatcaccttgtctgggtctgcaaataaaagtcaataaagtccttgattttgcgtctaaaggactgaacgtcctcgctccgtccctcagagtggattccggcttatcacctgatatggcaacgaggaatgcggatatgattgaagcggatcaaaacgattctttatatgtcacgaaggtatccgtaagatggtacagagagcttttaaaaaccattgatgccgctatggtgccgactgatgcgtttttaaaggtgccgcttttgcttatgcagggcggagatgacaaaatcgtcgataaaatgaaggtccgcaaatggttttccggtgtggcttcccataataaatcgtaccgggaatgggaagggctttatcatgaaatttttaatgaaccggaaagagaaactgtgtttaaggcggcaaaagtctttacagatcagtatatttgaattcgctgggggtgcatatgttgacagtaccggaacatccttttaaccttatggcaaaagtgtatcgggaaatttttccgctcgttcatcaggaattgaacatgtggcgggaaaaatcagattccattaaaaataccgaactgcggcagcaggcggccgcaagtatccgcgataagtcgtttcattgtgaaggcggcggcattttagccctgctttcgggagagcagaaacagaaatgcgtgcaatttatcatcgcgtatcagacaatcagtgattatctggacaatctgtgcgaccgcagcacctcgcttgatcccgaggacttccgcatgcttcatctctccatgcgtgacgcgctgacggtcggtgccgaggtgcggccgtactatcagtacagagacgagcgggatgacggcggttatcttcatgagctggtcagaacatgccagcgggtgctcgggtcaatagaacattacggtatcattaaaccttatttgcttgagctgtgtgattattattgcgatcttcaggttcataagcatgtcgttgagcatgaacgcgttccgaggcttaaaggctggtttgagcagtaccggtcacagcttccggaaatggagtggtttgagttctcggcttgcgccggatcgacgttaggcattttctgtctcgttgcttactcattccagcctgattttaacgaacataccgctgagaaaatccgcagcagttattttccgtacatacaagggctgcatatactgcttgattatttaattgaccaggaagaggatctgcttgaaggcgatctgaatttctgtacgtattatcagtctcatgaagaaatgatgcagagactgcagcattttattgaaaaagcggatgaacatttgcaaggcattccgcatgaaaattttcaccggctgatcaacagagggctgctcggcgtctatttatccgatgacaaagtcgccggccaaaaagaaatgggccgcctcgcgcgaaagctgatcagggcaagcggaaaaacgtcatttttcttttatatcaacggaagagcctaccgcaaatttcagaagatggcttggacgaaaagttcgtaatgggtgaactgcgcctctcgtgtaaatcacgacggcgcagttttttatttatgacgtgaagtatgaaatgaaacattgtttgcgcctgcagaatatgatactttaattttatgaaaaaattaaagtatttagcggccatagcattactttccatttccggaggctgctccgtcatccatgcttccgccggctatcatcctgtcttgatagcgcacaggggctcttctgcgattgagccggaacatacagctttgtcttatgcgcgtgccattaaagacaaagcagattatattgagatagacttacgggagacgaaggacggccgtctgattggaattcacgataaaacggtagatcggacaacagatggtaaagggatgacagatgatctgtctttggctcagattaagaaactgaatgcgggaaaaggagaaaagattttaacattagaagaaatcatacagaaattcggacaaactgccaattactatattgagacaagagaaagcaacggcagcctggtgatggaaaagaaactgattgacatattacaaaaacataagctgatttccagccataaagcagtcattgagtcttttagcgggaagagcttaaagaaagttcgatctatggataaaaaagttcctcttgttcgattattaaaagataacgaggctgaggagataaatgataagcagctgcaaaccatcagaacgtatgctgatacagtcgggctcaacgccaaattggcaaatgaagcagtcgtgaagcgcattcatcacaataagatgaaagtgcacgtgttttttgataaggaagacgagcatacgctgacgcctattatgctgaaacaaaaagcagatggtgtctttacgaacaatcccgcttatacacgcagcgtgctgcaaaacagtaaataaaaagagacatgcgcattttacgctgtctctttttttaacggtttcttttttgccgcaaggtgcattgcgaatttgccgatcagcccgatgacaaaaaatgcagcaaaccaccagtaataggtttttgcgaactcaaatcctaaatgtcttgataaaatgatgacgaacatcacatagggaacacttgaaaatatgatgcgaagaatattcaaactgccgctcctcccagatgttacacttaaaagatgtgcttttttccattatttcatagtaattgatttttcttgaaaagtaaacacaaaaagaatcggcccgcttatgacaggccgattctttatttgccggcagatttcttttcaatcgctataataaacggagggtcgtttcgctggttgagaaagccgtagctcagcacgcgcgctttttcctgatcaagattgctgcagtactccagtaatgcacttttttccgtcttgccttcaggatgcccgtggtacacaacgagaacgatcagcccgttctccttcagcagttcaaggagctgttcgatcgcggaaatggttgagtggccgtttgtcgtaatgcttttatcgccgccgggcagatagccgagattaaacacggcgcaagccacacgaccgtgcgcatcctcaggcagcgatgcctttatttgatcatggctcttatggtgaagcgtgacgcgcggactgaagtcggcaccgagccgctccttcgttttagcgagtgcgtccgcttgaatatcaaaggcatggacatgtcctgtctcaccgacaaggccggccaggaaatatgtatcatgtccgttgcccatcgtcgcgtcaaccgtgatatcaccttcctgtgcggcggacttcagcaattctttactgaaagggaggatgtgcatcaaggtcatagggcggtctcctccccgatctttctgaagagctttccttgatagcttccccgtgtttccagctctttttgaatggcgcccagtacttcccacttattgacgctccacatcggtccgaccattaattcgatcggcccgtctcccgtaatgcggtgaacgatcatttccgggggaatgatttcgagctgatcacatacaagacttacatattcttcttgagaaaggaactccagctttcctttttcatattgcttcaccatcggtgtgccttttaataagtgaagcaggtgaattttaatgccttggacatccaaatcagcgacggctttggccgtctccatcatcatgtccctgttttcaagcggaagcccgttaatgatatgggaacaaacgcggatgccgtgttttctcagtttattgacaccctcaacatagcagtcaaaatcatgggcgcggttgatcagaagggcagtccgctcatgcacggtctgcagtccgagttcaacccacaaataggtccgctcattcagttcggccaaatattccacgacatcgtccggaagacagtccggacgggtcgcgatcgacatgccgacaacgccgtcaagcttgaggacggattcgaatttttctcgcagctcctctaccggagcatgcgtattcgtgaacgcttggaaatatgcgatatatttgccgtctttccacttttcgtgcatgcggtttttgatatcgtgaaattgcgtgagtaagtcatcggcccgattgccggcaaaatcgccggagcccgccgcgctgcagaatgtacagcctccgtgtgcaaccgtgccgtcccgattcgggcagtcaaaaccgccgtcaagcgcgactttaaacactttatgcccgaaatgctcccgcagatgataatttaatgtatggtaccgtttttccgtatttgaataaggaaaagggttattctcgttcaatgttcaaaaagcctccctcacatcagatgcatcctaaaattgtagcatgaatgatgggggttcacaatctgaaaacaggatgcggctttcttttgtttattatgactgcgggcaggattctcattcttttagcttaaacgcggaaaatttggttctctttcctgcaaccttcgggtgttattatttttggtccgctcaaactaagtttgatttcccattcactgaggaggggtttcgttggcaacaagacaatcagtagatgaacatctccaaagaagcgaacaggcgtatgaatttgcgaatgagcaatttatgaccgcttcgaaacaagagcattataatgataatgagtacagtgaagcgcaaatgatgcttgaaaacgcggtgaatgaattaaacaagctgtcattatctgcgaatgatcagcaaagagagcagctttaccgaatgagattgcagctgcagaccttgcaaaacaatatgattttgcagcgtaattttgattactgaccgcgccgtttcaaatggttcagcaaacctgccggaatcccggcgggtttttttgtatttttttaaaaaaagaattgacaatagggcggagtgtgtttattgtattacgtgtactacttgatgtaatacacataaaacactcgaaaaatgaaatcgacatataaatgttaaccatagggaaggggaactttcatgaaaaacaaaagatccgtaaaacaagatgtgcctcttattatcgccgcctcggttttggcaagcagtctgtttgtcgttcttgtcgtcatcggttttcaatggcagaacatttaaagaaagagagcagctcgtaaaagaaagaagggaagtaaatgattcaaatcgatccgagaagctcaactccgatttatgagcagatcatacagcaactgaaagagctttgtttaaaagggatcatgaagccgggggataaacttccttctgtcagggaattggcaacgatcattatcgccaatccgaacacagtcagcaaagcgtacaaggagctcgaacgcgatggtgtcattgaaacgctgaggggaagaggaacgtatatatcggagaatgcaaaaacgacattggttgaagggaagatgacgatgataaaagagcaattgaaacagctcatcatcgatgcccattacgcgggagttgagctggagaagctgcaggaatggataaaggaaatcagcgctgatgtgaaaggaggcaaggatcatgattgaattgcggaatctctcaaaaacgatagacggtaaagaagtgctcaaggatatttcgctcaccatcggaaaaggggaaattttcgggctgctcgggcgaaacggatcagggaaaacaacactgctccggctcattcaacagattctgctgccggatcaagggacggttttatttaatcaggtggaaataaagcggcatccgaaagtaaaacagaacatcatttatatgcctgttgaaaatcctttttatgacaagtatacatataaacagcttgttgcgattgtaagcagaatctatccgaattttgatgtgacttacgccaatgagctgatgaacaggtacggcattccggaaacgaagaaataccgtgaattatcgacaggcctgaaaaaacagcttgcgctcgtccttgcctttgcttcacgcccggcacttattcttttggatgaaccgacggacggaattgacgccgtaacgcgtcatgatgtgcttcagcttatggtggatgaagtggctgaacgggaaacgagcattctgattacctcacaccgtttagaagatattgagcgaatgtgcaaccggatcgggtttttggaaggaaatcagctgacgaatgtgatggacttggatgatatgaaggaagagtacatgaaaatccaaatggcatttgaagaaaacgtcgccttgaagatcagagaacaaaacataccgattctcgaccatgccggtgtgttttatacggtgctgattcaaaagaacgatgagaagaaaaagaactttctgcaagagctgcagccgaaagtatggaacgagcttcctgtgaacttagaagaagtcttcatcgcgaagtttggagggaaccgaagatggtagacaggggattgctgtacagggaatgggtgcagaatcgaactgttcttgtgatggtcggcctttttttagccgcggtcaatccgtttgaagtgttaaatacctatctggtctatcaaggctgtctggacaccccggaagcatattgtaacttttatgtgaattctttggatagcggaatgctgaacttgaactgggcgcccgctgtcattttggcggtttgcttattcggactggagcgtacgaaaggtacgattgatacgcttttcagtctgccttattcccgcgctcaggtgtttcacactaaattttggctcggggcggcggtcattgccggattccaaatcatcggctacgggctggctgaactgctcattcttctgttaaagcctgagcgcgtatatttcttccaccattacagcgtcggagagattattgtgagtgttttggcttttacattggtcgcgagcgcaggctgcttaacggggaatacgttcgcccagctgttaacggcgtttgccgtgtcgatagcgccttacctgattattacgctgcccctgtccaatgtagaagtcatcttcggagtcagcatgtatgagctgatgccgtcagtcgaggcttatcttaaagtaaacaatctttttcaatacttgaatccgatcatgtacattgatacagattgggtatctgccagcaagtatatattactcatcccggcagtgatgagcattctattttatgccattgggtacttttgctatgtcaggcagccggtggaacggaacggccgtttttttctctggagacagcttgaccggcccattcagattgtggtgattataatcgccgttctcggttttggcctggcggggtactcgacgggacatacgatgacagggtatgtggccgggatgattgtcgggggagcggtcggatttttggtcagttattttgtgatttataaaaaaacgaagcatgtgtaagagaggaggaccggaatgataccgcggggattgttgtacacagaatggaagaaaaatcagtggttgtttttatgcagcggcattcttttaatggcggcaaacccttttatggtttataacaactactcaacatatcaagaatgtttgaataacccagctcttcaagattgtgaattcgttgtcaattatacgaatgggtcgcctctttccttcagctggagtgtaagtgtcatcattgctgtcttcttattaggcttggaacggacaaagggaacgatggatgccttgttaagcatgccttacagcagaggccaaatctttcagacgaaattctggctcggcgcagcagtcattgttgttcctcaggcgataggctatggagcggcgtcattgctgatatctttgctgaaaccgagccatacgtacgattttgatcatttttcaatcggaatgattgtcatcagttttatggcttacgccttgttaatggcatccggcgcattaacgggacagatattcgcccagctgttaacggcgtttaccgtcacggttctgccctttttactcatcggtctgccggccgcgaatttggaggtcgttttcgatattagtgtgggaagtcaattttcttttatcagcagttatatcgaatcccgtctttttatatttgtaacccctattggatatgtgtttaacgactggatcagagaaagggatttggttttaatcattccgattgtgatgagccttgtcttttatctgatcggttatgtcagctttctgaaacacccgaatgaacgggacggcagattctttctttggagtaagttggaccgtccggtgcagatcttggtgattgcctttgctgttatgggtttcggcgttttcggatatggggtcacagacacgatgttcggctatttagccggcattatcttcggcgcggttatcgggtttttcatcagttattttacggtttacaggaagtcaaagcatatgtagatctgtttgaaaatgagcagtttggaggaaggcaaggtgccgattagcggtttgctttataaagaatggaagcagcggcagatgctgctgcttcttacagcggggttcttagctattttaggccctttggcaattataaatgagtattttcactataaggattgtttgagtgcgcttcatcaatattcaggttcagtttgtacgttcagtattgattacagcaatcggaatttgatcgggctgcatttcattcctccggttatgatggggctttttctgataagaggaggccgggctgaaaggatgtttacactgagtcttccgtattcgagaagccggatatttcatacgaagtttttcttgggagcagccgtgttagccggctcgcagtttgtttcttacggagtatctgacatattgtttctagcgcttaatcctgacgctgtccatcattttcaatcgttcagcgcagggatgctggtcatcagcttgatgatttatgcattagtgacagctgccggcacgataacgggcaatttagcggcgcagctgatcacagcgttcacggtttccgtctttccgatcgtggttatgacgatttacctgttaaacgctgagttcctttttggcaggcaggctgtgccggatattgatttcccttggagcggatttctgatctatttcatgcctgccgcttacatccatacatcatggatgtattacatgaaacacgcattgttaatttccgcattaatgggatgttgtttctatctattcggttatgtgaatttcctgaaaatgccgagtgaacgaagcggacattttatcctaagcaaacacattgaacgcatcattcaattgctcgtcatgtcgctcagtatgctgggaagtgcgggggtatgcggatatgcttataacggttcgtataccggttacatattcggcatgcttatcggcgcggttatcgggtttttcatcagttattacttcatctataaaaaaacgaaacagatataagggggagtggtgtacgtgatagaagtacagcatattgatcattcatttaaaatcggcaggaaaggcagagagagtgaggttccggtattgaaggatgtctctttgaccgttgaaaaaggggaaattgcctgtatcgtcggtcggagcggttccggaaaatcaacgcttctgaatttaatatccggatacatagcgccgacgaagggccgtatcgtcattaacggcactgatgtgacgggcttcagtgaaaaagagtgggcgcagttccgcctcgggcatttcggctttatttttcaaagctttcagctcattccgagtctgacaacctatgaaaatgttgaaatgccgcttgccttaaaaggcgtcaaaccgtctgaacgcaagcagaaagtcgcggacatgctgaaacgggtcggacttgagaatcatgcgaatcattatccgaatgagctgtcaggcggccagcagcagcgtgtcagtattgcaagagccctgattttaaatccgtcaattattttagctgatgagccgacgggaagccttgattcagaaacggaacttgaggtgcttgcattaattcagcagctgaaccgggagcgcgggattacatttgtcatcattacgcatgacgatgaagtcgcttcgatcgcgcattcaaaattccagctgcatgacggtgtattaaaagggggcgttactgttgagatttaaggatcagattcactttatcagaagaaatatgaagaaaaaccggctgcgtgttttcatgacggtgctggcgacgacaatggcgtgcgcgtttttagtggtgctggcttccgtcggattcggcatccaaaaaacgattacagacattaccatgagccagcagattgttacggaaatcaatgtgctcggccaagagaacggaaaagccgtgaagaagtcagacttggaaaagtataaaaatgtcaagtctgtcgttgaaagaacacaagtgtatgaaccgaacaaagcgtcattgggaaaccgaacaaatgaagattcagccattgtgctgacaaacatgaacgatgaagtcaaagccaatatggagcttgatcagggaagagtcgcccgcacagagaatgaaatcgtggtcggctatgattttgcgaagaacctattgacgaaaaaagaggctgacgcttacgacaaagagttaaatgatcaccaaggcgacatgtcggaggtgaaaaaaccaaaaggctatacgaaagacctgcttaataaaacgatacagctgagcatctccaaaactaacaaagacggagacgttgagaaaacgaaaacgtacgactttaaagtagtcggaattacaaaaaaaccgtcccaagattggatggaggatacaaatatttttgtgagtgaccaattcaagaaggacttctcaacattcttggatctgaagaatggaaatgcggaaaaaagcatcaatgtgtatgcggacaaattcgatcatgtcgatcagcttacccatgacctcacggatgacggcttttatgtcagatctgtcacaaccgagctgaagggcgtcaacacctttttcctcgtctttaaaatcggcctgatctttgtcggctttatcgccgtcgtgatttctgccatcggtattttcaatacgatgacgatggcggtgacggaacgaacgcaggaaatcgggattatgaaagcgatcggcgcaagcccgtccatcatccgcagaatgttcctgatggaaagcgcctatatcgggatattaggttctgtcatcgggattatcatttcttacggagtgagttttgccgtcaatctggctgtgccggttatcttgaaagcggtagggggaaataccggagccgaagatcttcattataccttctcctatatcccgctcagcctcgttgtgattgcagttgtcatttgtgcgggggtcgcggtgatttccggtatgaatccggcccgcaaagcgacaaaaaccaacgttctgactgcattaagaagagaactgtaaaggaaaaaagccggctggacatcagccggtttttcctctatctatcagaaaagggcggataccatgtttcacattttgttaatagaagatgataacactttgtttcatgagatgaaagagagattaacgggctggtcatttgcggtgcacggaataaaagatttcagccgggtcatccgggagtttaccgaaatcaagcctgatttggtgatcattgatgtacagctgccgaaatttgacggctttcattggtgcagaatgatacgctcccaatcaaacgtgccgattctctttttgtcctcgcgcgatcatcccgcggatatggtcatgtcgatgcagctcggggcagatgattttattcagaagccttttcactttgatgtgttaatcgcgaaaatacaggcggtgttccgccgtgtgcatcaatacggcacagaaccggcactgatgaaaagatggtgcggggcggtcattgacacagaaaccaacacggtcagccgtaaaaacggttcggtcgagctgaccaaaaacgaaatgctgatcttaaaactgctggctgagcagaaaaataaaatcgtcagccgggaagaactcatcagaagcctatggaatgatgagcgtttcgtcagtgataatacgctgacggtgaatgtcaaccggctgcggaaaaaactcgatcaattaggcatcgggaaaatgattgaaaccaaggtggggcagggatacatcgcaaaggaagaagacggtctttatgattaaatcatttctgctcgaaagaaagagctggatcgcgatgtttcttttgcagcaggctgtgctcctttttgcggcatatattgatccgtctattccgtttctttcagtgctgtatttcgtttacctatcgcttcttgtgtttcttgtatttctcttgttccgctatcgtaaagagaccgcctattataaaagcttaagagagtgggacgccaatttagacatgtcttatctgaaagcgcctgaaagtccgtttgagtctatcgttgaagaaagcattgaagggcagacagagcagttaagaaaaagctcacttcaccttcaggcggcttcagagcatgaaaaggacgatctgatgtcatggattcacgaggtcaaaacaccgatgacagcgatgcatctcatgattgagcgtcttgatgaacagccgctgaaagcccctttgctgtatgaatggctgcggattcaccatcttctggaccagcagcttcatcagaaacgattgtcctttattgaaaatgatttatcattccagcgcattcagctcaggccgctcgttttcaaagaaattaaaaatctgcaatcatggtgtatacaaaaagggatcgggtttgacattcagcttgattcaccagacgttcacagtgacggaaaatggctttccttcatcatcaggcagctgttaagcaatgccgtcaaatacagtgaggcggatgacattaccgtaaaaagctatgaacaaaacgggcgggtgcatgtggatatcgaagaccgcggcatcggcatcgagcccaaagatcttccgcgcatttttgaaaagggatttacctcgacgcgaatgaggcgtgatcacgcgtcaacggggatgggcctgtatttggctcaaaaagccgcggcaccgcttcttatccagatcagcgtgcgctctgagccggaaagcggcacggtttttaccttggtgtttccgaaacagaacgatgccgtcagcatgttcagcgtgtgacaaaagtgtcacatgcttttctcttttgttcgcttaatcaaacgaaaaaaacggcttctgttttttaaaatagagataaccaatgtaaaaggagaatcagaacgtgatgattttagaagcaggcaatatccaaaaaagctacggaaacaagctgaataaacaagaggtgctgaaaggaattgatcttcagattcacaaaggggaattcgtcagcattatgggcccttcgggatcagggaaaacgacccttttgaatgtgctttcctccattgataaagtgagcgcgggcaccattaaactgaatgagacggagattacatccatgaaagaaaaacagcttgccgaattcagaaaacggcatctcggctttatttttcaggattataatttattggataccctgaccgtgaaagaaaacatactcctgccgttatccattacgaaaatgtctaagaaagaggcggacctgcgatttgccgagacggcagaggagcttgggatctatgatttgagacataagtatccgagtgaaatttccggcgggcaaaaacagcggacgtctgccgcaagagctgttattcacgagccgggcattatttttgctgatgagccgaccggagcgctcgattcaaaggctgccatggatttactgaataaactcagccgtctgaatcaaaaacgccgcgccaccattgtgatggtgacgcatgatccggttgccgccagctattccggacgtgtggttttcattaaagacggccgtgtgtatacacagctgaataaaggcggccaggacagaccggacttttttcaggatattatgaaaacgcaaagtgtattgggcggggttcaggcatgagtattcatcatttgatcttccagaacctgaaaaagaatttgaaaaactattacctttacgtttttgcgctggtgttcagcgccgccctttatttcgcgtttgtcacgatgcaatacgatccggcgcttgatgaaatgaaaagctccataaaaggagcggcggcaatccgggccgcctctgtactgcttgtggcgatcgtgtcggtatttcttttatacgccaacactatttttattaaacggcgcggccgggaaatcggcttattccgattaatcggcatgacgaaaatgcacattttccgcatactcagcacagaaaatttcattttgtatttcggatcgatttggatcggtatttttgccggcttttctctctcgaaattatgtatgatgatgctgtttcatacagtcggtgtgaaagcctctgtctcactgtttttttcaagcaaggcgctcgttcagacgttaattgtgttcggggcgatttacgtgctgattatgatgatgaattacttatttattaaacggcaaagcattttgtctttatttaaaaccgcgtcatcgtcagaaagcggcataagacggctttcttgggtgcagatgtcgatcggcgttgtcggtattgcggccattatcgccggctatgccgtgtccgcggatttattcggaggcagttttacgagcatgaatgaactgttttcggccatggtgtttattctcggctcggtcattatcggaacctatctgttttataaaggttcggtcagctttctggcaaatctcatccggaaatcaaaaggcgggtatctgaatgtcagtgaagtgctgtctttgtcatccatcatgttccggatgaagtcaaacgccgtcctgctgacgattattacgactctttcggcgctggcaatcggtttgctgtctttaagctatatctcgtactattccgcggaaaaatcggctgagcaaaatacagccgcggactttgcgtttgataaccaaaaggagactgactcatttaccgctttattgaagaaaaacggaattgaacacaaagtgaaaacaatcaagaccattcaagccggtgtcaatatgaagaacatcataaacggcgatatgaaaagctttcaacaagacccgtccagcttggcgctgccgattataagcgagaaagacgcagaagggacggagctttctgacggagaagccgtgtttaccggatataatgatatgatgaaaagatttctcgacctgaaaacgtcaggttccattgatataaacggaaaaacggataaaataccgctgacgtataagggcttgaagaacgacttcctcctgtcatatacatttacaagcggagggctgccgaccgttatcgtcacgcagcaggtatttgatcggatcgagaaagatatcgacccgtccattcagggaaaatcaaatcggtttttcggcattacactcaaacgtgaagaggacatccaaaaagctgatggtctgtttcaggcgcagcactattctgacggcgcgctttcacaatttgaaacggctgacacccaaaagaaaaacatggggctgatcatgtttattgtcggctttttggggttaacctttctgatcacctcaggctgtatcctttattttaaacaaatgggcgagtgtgaggatgagaaggctgattacacgatattgcggaagctcggcttcacaacgggggatctgctgaaaggcatccgccggaagcaggcgtatcatttcggcatcccgctcgttctcgggctgttccacagctattttgccgttcagtcaggatggtttttattcggaacggaagtgtggacgccgatgatcatcgtcatggcgctgtatacgctgctgtactccatcttcggcatgctgtcggtgctatactataaaaaggtcattcaatccgccttgtaaaacaagttgaggagcctccgcataagcggaggcttttttgtatgaatagaagaaagcgatttttaaaagaatagacatacgtcattttttcgcgcgggggagccttatgcagagatattttcaattgaaatctgaaacaggagcctttcatcttttttccaaggaacacattttcacgctgttgatcatcggattgctgggggcgggcgtgatcgtattccggaaaaagctcaactacggccggtcgaatcgcgttttccgctatgtactgttcattttccttgccgtgtcgcagatcagctatcatatatggctgctttgtcatcatgcctggtcgctgaaaacagctctgccgctgcagctgagcgacctttccgtctatttggcaatgctgatggtcatgacaaaaagcaaaaaactgttcgccttcctctattttgccggtttgggcagcgccgtacaggcgatggcaacacctgatttaggggcgtattctttccctcattttcggtacatcgtgtttttcgtctcccacggctgtgtttttcttacctgcctattcatggccgcttcagaaaggtacagaccgtcggcgcgcggactgtgggtgtctgtgctgatcgtaaatctgtacggggcgtgtgtcttttttattgatcgtgtgctgaatgcaaattacttatatttaatgaaaaaaccgaagaccgcttcgcttctgaatgttttcggaccttggccgtggtatcttctatcaatggaagcggcggtgatattgagctttttcattctgtatattccgttttggctgctgaggaaaagagcatgaggccggcctgtttttgtgaatccaatcatttgtaattttttcaacattccggcattatttttttcagattctgatgttgaaaaaagacgtccgcggcgatagaatgaatgtgctatgataacgtgttcgatacggagccgcggcttgcggtttccgttttttcatggggttttttatagagagagggggatcggtatgccgcgcgctttgaagatattaatcatcggaatgtttatcaatgtgacgggcgcatcttttttgtggccgctgaatacgatctatattcataatcatttagggaaatcgctgactgttgcgggggtggttctgatgctgaattccggggccagtgtggcggggaatttatgcggcggatttttgtttgataaaatcggcggattcaaatccattatgctgggcattatgatcacattggcaagtcttctcggactcgttctgtttcatcaatggcccgtttatatttggctgctcatcattgtcggcttcggttccggtatcgtgtttccggccagttacgccatggcgggagcggtatggaaagaaggcgggcggagagcttttaatgcgatttatgtagctcagaacgcaggtgtcgccgtgggctcggcactcggcgggatggttgcggcgtactcgtttacgtacgtgtttttagccaatgctatgctgtatgtgctgtttttccttatcgtatttttcgggtttcgaaatatcaaaacccaaaatgcgagccaggtttctgttctggactacgagcctgtcagcagcagaacgaaatttacggcgcttctcatattgagcggcgggtatgttctcgggtggatcgcctattcgcagtggtccacaaccgttgcgtcacatactcaaagcatcggtatgccgctttcattatacagtgtgctctggaccgtaaacggaatattaattgtcgccggacagcctctcatgggagctgttctgaaaaaatggtccggtgcgttaaaaacgcagatggtcatcggcttttgtatttttatcgtctcgttcggcgtgcttctcagcgccaagcaatttccgatgtacctcaccgcaatggtgattttaaccgtcggagaaatgcttgtctggcctgccgtgcctaccattgccaatcagcttgcgcctaaggggaaagaaggattttaccaaggattcgtcaacagtgcggcgacgggcggcagaatgatcgggccgctccttggcggcgtgctggttgatcagtacggaatgagcgtgctgctgttgatcctgatggtgcttcttgttgtcagcatcgcagcgacggtgctgtacgacaaacgcctgaaaaccgttaataaacaaaacgtccaagtgcgatgacgacataaaaaaaatcccgctgtttcggcgggatttttttgtttatacgaccggaagcacgttgacggcgtccttaacgtttaaatatgtctttaatgaagaaaagctggcatcaagctgattcattctcatggcgagggtaggcttgataccggtgataatcaattctgtgccgattaatttaagcaggtggtgcaatttgaaaatccggtctgcggtctgttcgtttacctcggccagacctgataagtctataattaagtaatcatctttagatgcggttaatatgtctgtcaaagttgtcacaattgaatcaaatcgttcttccgttaagtttcccactaacggcaaagcggagatgccgtttcggatcggaacaatcggtgttgacagcgtcgtgatttctgtgagggaatcctcaaggagcttttcgtattctttctgctctgtaatgtctttttgaaaaccgacaaaatagagcttgtcttcaacataaagaggatcaatgttgagttcattccaaaacggggtgccgtcttttttgacgtttttcagccgcaccgtgatcttttctttctgggttaagctctttctgattttcgcgacttgttgacggtcggtttctttgctttgcagaaatctgcagttcttacctaatatctcttcggaagagtagcctgtcatatccataaatccctgatttgtatatatgatgggattgtcctcaagagaggggtctgtaatcaccacgccgatgcgtgcgtgatcaagcgcctttttgataagctccagctgctccagttttccggatacatttgagtcagccatgtaaaacccccttttggccgtaaagctgcgcgctttttcagccgtgtttctcccctttttaaatgaatctacagtaaccgtagcataacatatgttctgattcaagcagccgaagtttgcaatttgtcattcgggcttgtcctcatatacactgaatatataaagggaaggcacatcatcgctaagtaagtgactaggtcattgtcactgggtgaaaaatgaatctaatgcatcaagcttaccgatcatgtgttcacatataatggaagaaacaagctttttactttcctgctcaatcgccggtatgtagatatcgaaaatcatcgtattcgtaagggggctggatggcctgaagtcgctttactaaataagggctttaggaaggtgatgaagatgctgcatcaggtaataattgcttgtgtaattggaggaatcatgggggttctcggtcatgtgaaaaagagaggcaggctggagaaacccagaatgacaaagcggtttatctatctcggttttttggaagatggttttatcggaatggctgcttccatcttacttgtcttatccgctgaccccgattcaggaattcaactcgtcatcttatccataatcgcaggctacggcggagaagctgttctcaggagctttgattttgtcagagaacaaaacagtgattcggccgaagcaaaaccacaccagcaaaaaaatcctccatcaaaataatatccccgctcatgacccgttccgggtacattcccattgtatacaaacctgcttgcacttatgaacagaattctataaaatacaggtaagattacggtagcgataagaacagtgaagaggagcagtaagaagcagattttgcaatcagagagttgacggccggtgcaagtcaatcaagtctgtttccgaactcgcctcagagttgcagcggcaaaaccgctgacgcataactgcgttaaaagtatcaagtgagtgcggctcaaaaccgcgctaacgagggtggtaccgcgggaaataaaaatctctcgtccctttttgggatgagggagtttttttagttttagaataatctgaatataatctttctcatcccgtcaatacttggactacatacgccgtattcaatcagaaggaggtttttacgttgagttttcagcatgaaaaaatagaaaagaaatggcagaattactggttggatcataaaacgttcgccgtcagtgaagagaatgacaagccgaagttttacgcgcttgacatgttcccgtatccttcaggagccggccttcatgtcggacatccggaaggctatacggcaaccgatatcctttcgcgcatgagacgcatgcaaggatacaatgtgcttcatccgatgggatgggacgcgttcgggcttcctgccgagcaatacgcgcttgacacggggaatgatccggctgagttcacaaaacaaaatatagataatttccgccgccagattcaatcgctcggattttcatatgattgggatcgtgaaatcaatacgactgatccggactattacaagtggacgcagtggatcttcaccaagctgtacgaaaaagggctcgcttacgtagacgaagtgccggtcaactggtgcccggcgctcggaacggtgcttgcgaacgaagaagtcattgacggcaaaagcgagcggggcggccatccggttgaacgccgcccgatgagacaatggatgctgaaaatcaccgcttatgcggacaggcttcttgaagatttagaagaccttgactggccggaaagcattaaagacatgcagcgcaactggatcggacgctcagaaggcgcaaacgtccatttcgcgatcgacggcactgatgacacgtttaccgtgtttacgacaagaccggacacgctgttcggcgcggcttatgccgtactggctcctgagcatgagcttgtggaggccatcacgacgcctgaacaaaaagaagcggtagacgcttatgttaaagaagttcaggcgaaaagtgacctggaacggacggatcttgcgaaaacaaaaacgggcgtcttcacgggcgcatatgccgtaaaccctgcaaacggagaaaagctgccgatctggatagcggattatgtcctcgcctcttacggaacgggcgctgtaatggccgtgccggcgcatgacgaacgtgattttgaattcgccaaagtgttcagcctgcctgtcaaagaagtcgtaaaaggcggaaacacggaagaagaagcgtatacgggagacggagagcatgtcaattccggctttctgaacggactgaataaagcggaagcgattgaaaaaatgatcgcctggcttgaagaaacgaaaaacggtgagaaaaaagtgacatatcgtctgcgtgattggctgttcagccgccagcgctattggggcgagccgattccggttattcattgggaagacggcacgtcaacagccgttccggcggaagagctgccgctgattctgccgaaaaccgatgaaatcaaaccgagcggaacaggtgaatcaccgcttgccaacattaaagagtgggtggaagtcactgatcctgaaacgggcaaaaaaggcagaagagaaacgaacacgatgccgcaatgggcgggaagctgctggtatttcctccgctttatcgacccgaaaaatccggatcagctcgcttcacctgagaaactggataaatggctgcccgttgatatttacatcggaggagcggagcatgccgtgcttcaccttctgtacgcgcgtttctggcataaattcctctatgatatcggtgtcgtgccgacgaaagaaccgttccaaaagctgtataaccaaggaatgattctcggggaaaataatgaaaaaatgagtaaatcccgcggaaacgtcgtcaatccggatgaaattgtggcgtctcacggagcagatacgctccgcctgtacgaaatgtttatggggccgcttgatgcatctatcgcctggtctgaatcaggccttgacggagcgcgccgcttccttgaccgcgtatggcgtttgtttatcgaggaaaacggcgagctgacgggcaaagtgacagaaggcgcaggcgaaactcttgagcgcgtctatcatgaaacggtcatgaaagtgacagaaaacttcgaagcccttcgttttaacacgggcatttctcagctgatggtcttcattaatgaagcttacaaagcgaatgaactgccgaaagaatatattgaaggttttgtgaagctgctttctcctattgcgccgcatttggctgaagaactgtgggaaaaacttggccacgaaggttcgattgcatacgaggcttggcctgcatatgacgaatcaaaactggtggatgatgaagtggaaatcgtcgtccagctgaacggaaaagtaaaagcgaaattaatggttccggctgatgctgataaagcagcgttagaacagctcgcacaagctgacgaaaaggtaaaagagcagcttgaaggaaaaacgatccgaaaaatcattgccgtaccgggcaagcttgtcaatatcgtggcaaactgaccgggcgaagcccctctcctacagagaggggcttttttatcaggcctctatcatagaaattgcaccgcgggctttggtatacttaacaccataaagatgaatgggagtgtcacacattgaaaataaatgaaatcagcacagccgcactggaagaaaaattaaaagcgggagaagagctgtatctgattgatgtcagagaagacgaagaagttgccgaaggaatgattccggaggccgttcacatccgcatgggggacatccctgagaagatggatgcgttagacaaggacaaggaatatgtatttatctgccgttccggaaaaagaagcatgaacgtttgtatgtatttacatgagcagggcttccgtacggttaatgttgaaggcggcatgctggagtgggaaggcgaaacaaagccgaagaaataacgctttgaagtgaaagaagaaaagggacgtgcgtctttttcttctttttttataaaaaaacgggaggcgaatcaggtgaaaccgatgatccgcgcgatgaaaacaaacgatatcaaacaggtccggcaagtcgcagaacgaagctggcatcatacgtatgaagggattattcccagacacattcaggatcagtttctcgaatccgcctatcaggatgagatgatggaacgccggctcttgcattctctgttctttgtggcagaagaagaggggcgagtgctcggttttgcaaatgccaccccggttcaaaaagacggaaatgcggagctgaccgccatctatattgacccggattgccagggaaacgggataggcacggcactccttaaagaatgcatcaggcagtccggcggggtaaaaaagctttatgtccatgcagaaaaagagaaccgcattgccttatccttttatcaagcgaaagggtttcaatgggtatgtgaatttgaagaagactttaaaggacacactttacagacggtcaaactggtactgaacatataaaagcatccggcccgcccaggaccggaacgcgaatgatcagtgataagccggaagccggtctttgtgcgcttcaaataagtcatcgcacaaagagatgatgtcattcatggaaagctcggcgctcgtatgcggatcaagcatggccgcctgatatacggcttccttttttaatgtaacggccgcttcgatggttaaaagctgtgtgttaatgtttgttctgttgagcgccgcgagctgctcgggaagttcgcctgaatagcacggcataatgtggtttttgacggctgtgcaaggcacttcaacgaccgctttcgccggcagattcggtatcagcccggtattcagcacattgccgccgaatgtgaacggtttgcccgtctccatcgcttcaataattctcgaaccgtattcttttgagcgttcatgcgtcaggttttggttgttgatgatgccgtctctcatcgtttcccaattgttgatttgttccgcgcatctcctcggatattcatcaagcgggatttggagttcatctatcagctcaggataccggctttttataaaatacgggtgatattcggcattatgctcagatgattccgttacgtagcagccgaatttatccatcagctcaaaccgcaccatgtccttatgtttcgtcttttgtttttcgcgtgcccgtcttttaatttcaggatataaatcaattccgtcttttttaatctccaaaagccaagccatatggttgatgccggcaatgcgttcttccgtcccttcgtgatccatgccgagtgagtcaaacagatctttggtacatacctggacgctgtggcacaggccgaccgttttgacatttgtatgtctgagcatcgctccggtcagagaggccatcggatttgtataatttaacagccacgcatccgggcagacctcttccatgtcttttgcgatgtcaaataaaacggggatggtgcgaagggaacggaaaataccgcctattccgacggtatcggcaatcgtctggcggagaccgtaccgcttcgggatgtcaaagtcaatgaccgtcgcgggtttatagcctccgacctgaatggcgtttatcacatagccggcgtgtttcagcgcctgttttcggtcatcgtaggagatgatggatatactcgtattgtagcggtctctcatgttttccagcatgagctgggattctttcagccgtacagcgtcaatatcataaagcgcgaattcaaatccgtttaatgcttcagtcagtaagcagtcccccaatacatttttggcgaaaatcgtgctccccgctccgataaacgtaattttcttcaacagaaattcctcccttttcttctcagcctttgaccgccccggaggacagccctgagataaaatatttttgaagcgccaaaaacaatacgaccatcggcagcatcgccatgatcgcggctgcggcgactaagtgaagattgttcgcgttttcgccgaaaaatcccgccatggccacggtcaatgtctgcaccttttgatcttgtaaaaagaaaatcgcaaattggtaatcgttccagataaacacgcaggaaattatgcagaccgttgcggtaatcggtttcaacaaaggaaacacgattgtataaaaagtcctgatcaatcccgcgccgtccatcctggcggcttcctcaagctctttcggaatggaagagcggataaaccctgaatataagaaaacggtcagcggcatatatgcagccgtattaatgagaatggctgcggcatgcgtattgatcagccccgcatcagcgaccatcttgtataaaggaaccatggaagtcaaaggcgggatgatcatgattgaaatcaaaaggccgaagacgattttgttcagctttgtatttcttctagcgagcgggtatgcggcaagcgaacccatgaaaattaacaaagcggcggaaacggctgtaatgatgatcgtgttcagaaaggattgcccgagagaggcacgttcccatgcttcacgaaaattctgaaatgaaaaggcggatggcagcgaccattttgaactgtagtcaccttttgcttttaatgacgtggtcagcaaaatataaaaggggacaatatgaacgcacgagataacggctgccaacagcgtaaaaatccgcattcgggctgttttcatgacatttccgtctcctttcgcttgaaatacacgagagccgaaaaactgatgacaagaatcatgacggacataaacacgccttgggcggcggcatatcctgcatcctgccgtttaaaatataaatcatacataaacgttgacatcgattgagaggaattgcccggcccgcctgcggtcagcgcgaaaatgacatcaaacagcttcagcccgccgatgatattgatgaccatgttgatggtgacagccggcatcaataaaggcagggtgatggtgaaaaacggctgaagacctcccgcgccatccatttttgcggcttcgtaataatctttcggaatgctttgcagccccgccaaatatacaatcatcgcaatgcctgcgtattgatacgtgttaatcatgacgataatccacgggtttgccgcagggcttgccaaggcgttgacaggaccgattcccagtgcgccaagcacatcattcagcgcacccccgtcatatgagaaaataaaataccaaatgtatcccataatcagcggactgataatgacgggcaagtagacgatcgttcttgtgagcgccttcatttttaagctctgattcaaaagcagcgcatataaaagtccaagcatattctgaaaaaaagtgcttccgatgccgtaaagcaaagtgtttttcacaacaagccacgtgtccggatctgtaaaaagccttttatattgagtaacccccacccattgatacgtctgtgagaagccgttccagtttgtaattgtgataaaagcgccttttacaaacggaaaaatcatgaaaataaaaaccgtggcaagggcgggaacgtacatccaccatagtgacgcggattttaccggcttttgatgttgaaatccttgggtttctcttgcaagatcactcattctttttcagctccccgtgaatcagattgaagccggagccgcttatattccctgccgagtttcgctgaaacttcagcgggggttaagatatcggccatcagctcctgcccggctgttcccatcacatcccacattccgttcggcaaataaaggcggtcaaaataaggctgcaccttaatatgctgatagcgcttatagtcatttgcgtagaaaatgtccgtttgcacattcactaatccggccggaagcgaggtcgcttcggcaattgattttgcatgctcgggtcgggccataaatgcgataaactgtttcgcttctttaagccgcggggaatccttgaatgccgccagcgtgtaacgttcgcctccgatccaaaccggcgcgtctcccttgtggacggccggggtcggtatgatgccgacttttaccttcggattgatttgagcgacatcttggccgagagtgccgccctgcagcgtaaaggcgattttgttttgcgccatcagttcaatgagctgggaccgtttcgccgtcacggcatctatattgagcaggttttccttttgcatctctttcagtttgtcagataaataggtgaagtgtgtccagcggaaggttccgtttaacagttgttttttgtaacggtgtgcgggatctgtgatgagaagcggtgcggcgagttgatcgtaatattgggcaaatgagcttttctcatagccggcaaaccagaagggggtgactgttccgccgcttttttctttaatctgtctcaatgccttcataaaatcatccattgtttccggcggttttattccgtatttttccaacaacgtacgattgtaggccagtccgtcctttgcctgattcagagggaaggcgtatattctgcctttggcgtctttgagcatgctgtttaaattcggatcgagccgcttcgtccaagacatgccgctgaggtcggcggtatattctccgtagcggattttggcccagccgtgtgtgtcgaaaagatcgggcatatcaccggccgccattctgaccctcatcatattttcgtagtcattgcctgggaaatgaacgtttacttgaatgtccggatgttctttttggaatgaatcagccaactttctgaatacggagcgttcgctgtctgaggatatggtggaatagactgtcaatgttttctgcttttctccggcgccgctctgttctgccgagcagccgggaagtatcatgcaagtaaaagaaagaaacaaagccagtaagcgtttcatcttttcctcctttaaatatgatataaacgctgcgggacacgtcacctcctttcttgtgagccgcagctttgtctgacaatcaatgaagtggggagcgtcacggccagcgggacggttctgccgtttaaacggtcgagaagcaatttgacacccgtccggcccatctcttccgtgtatacttttaccgttgataacggcgtgctggcgtattctgcctcatcaattccgttgaagctgacaaccgccgtatcgcgcgggacttgaagaccggcttcctgcagggcttttaaagcgccgacagccatcgaatcacttgcgataaaaaaggcatcggggagacttccgcctttgatggcttcattcatcagccggaacccttcgtgcatgctgtattcgccgatcagtacatgctccggctcggcgccggccatttgtaagaaagcggtcagacgcttatcctcaatcgttttattgctgtttacaccgtctatgacggtatgctcccgctctcggccgccgatataaccgagccgctggtaaccgagcgacagaagatgttctatcgccttttgcgctgcggcataaaaatccacgctgacggaatcgtagcgggcgggatcgggggtgccgttaacaaataccgcgtgcctgaaagcggcgctgatattcgtaagcgcctcgtcttgcaggctgccgatgacgatgacgccgtccagttcgtgaaacatatgctcttgaaaagaaccgagatggatagaagatgtgataaaaactttttgccgaaagcattcttcctcaatgccttttcggatcgccgaaaaataaggatcctgccgttcttcttccggtgacaggcagctgacaacgccgatcaggggcgctgaatcgctgcggctgcggttcttccgtttttttgccgacggctgatagcccagctcatcggcgatcctcagaactttttctctagtttcatcagtcacggccaaagagtcatccttattcaaaattctcgatactgtcgcgctggatacagatgcctgtaaggcaatatctttgagacggaccatttcgcatctcctttttactaaatatttactaaacagaaatgacctggttattgttaaaatgatattatcatacgagagtaagcgttttcaacaactattttcggttacttttagtaaaaatcagtaaaaaagaaaatctgtttttctctatcatatttcaattgaaccggaataaattgatagagaaaggagagggtgatgtgctgaagatagctgtttttgatgaggagcatgaaaaggatctgcagactgaagtcaatacatttttaaaggggatttctgatgaacagctcgttgatattaaatatacggtagcggcggcctgtgatcctgaaggtgagcagctttattgtttttccgctctcattttataccgaaaataaagaagcccggacgaaatgccgggcttcgttgttcattatgcttttttgacgcggggacttcttggtttttggtatttctccgcttgcttgattccttttctctcgctcgctaatgacttgtacagagacacgatcatcagaaggatcacgactgaaaacggaaccgcggcgagaatggccgtgttttgcagtgcggccagaccgccggaatataataataccgctgccacggcggactggatgatgccccagatgattttcacccggtttgacgggtctaaagagccgtaagacgtttgcattccaagcacaaatgtcgctgaatccgctgatgtaataaagaatacagcgatcagaacaagcgttaatacggatgtcaccattgtcagcggatagtggctgagtgcgccgaacagcatcgtatccgttgacattcccgcgacattgaatacgcctttctgctgaagatccatcgcggatacaccgaagatcgcaaaccataagaaagccaatatacaaggtgtcaccaataccccgattaaaaattcccggatcgtccggccccttgatacacgggcgataaaaatgccgacaaacggcgaccaggatatccaccaggcccaatagaaaatggtccagctgttaatccattcgcgcttttgaggatcattcggagacaagcgaaagctcatctgcacgatattttgtatgtattggccgatagaatcggtaaatgagttcataatcagcaccgtcgggcctgcaatgagcataaagatcattaaaatagccgcgagcgccatgttggtattgcttaagtatttaatccctttgccgattccgctccacgcagaaatcaaaaataacacggtcacgacagcgatcaggatcagctgaatggaaaatgttttcggaatgccgaataaataatgcagaccgccgttgatctgagtcgctccgagccctaagcttgtcgccacaccgacaacggtcgcaaacacggcgatacagtcaatcgctttgccgatcggcccgtttactttatcgcccaaaagcggtgtcagtgtgctgctgatcaaaccgggcgcgtcttttctgaattgaaaatatgcgatacataaagcgacaaccgcatagatggcccaagcgtgcagcccccagtggaaaaatgtgtaccggagcgcatcacgaaatgcttggggcgtttctgtttcacctgagggagagctgatggcgtaatggctgatcggttccgcagccccgtaaaataccaaaccgattcccatgcccgcgctgaaaagcatggcaaaccatgataataagccgaattccggtttttccccgggttttccgagttttattgtgccgatcggactcacaatgagaaagagacagaaaccgacaaatatagaaacgaccagcagataataccagccgaaagaatccgtaataaatttttgtgccgtatcagtgacttgctgcaggctgtcaggagaaatggccccccataaaaccgcagcggctgtgatgacaatcacaatccaaaaaacactggagatgttcttcttcaaacgttctcaccctctgactatttttttcaatacgccattttgttttagtatggtcgtacgattgcagatcattcctttcttcctattccctcaatcaggtgaaacaaaacgcagaaaactctatcatgtttttggtcaattatcaacggggacgctcaggtaaatgcgctttaaaccatttagagcgagcgtgagaaacgtcctgcattcaaaccggcgagacgccctgtgacaaaggctgaagtgatattgtagcccccggtataaccgtgaatgtcgagtatttctccgcaaaaatataagccttccatttttttagacgccatttgtttcggctcaatctcttttacggaaacacctccgcctgtgacaaacgctttgtccaaagaaagcgttccgtcagcggcaaccgtaaattgtttgcagtctttgacaaaagccctgaattgatccttcggcagttccgtaaagcttgtctgcggatcaagaccgttccgttccagaagaaaaagcaggtaccgttcctgcatccacggcttcagcgcatttttgagcgcttttttcggtgcgtctttcagttccttgtgcatcttttgaaataactcttcctcgttgatgccgggaaacagatcgatgcggagtttgacctctggctgctttttcagttctttgacgacaaactggctgcagcggagaatggcggggcctgacaagccgaaatgggtaaacagcatgtccatcacgtgtgtgacgattggtttgccttttttattcaggacgctgacggccgcgtttctaagagacagcccctgaagtgttttttgtttaataaacggttctgacgacgtaaccggcacttccgtcggaaagagttcggtcacggtatgaccggccgcttccgcccatgcatagccgtctccggtgctgccggtatgcgggactgattttccgccgaccgcgataatgacggcgtctgcgttaatgtgttcgtcattgtttgtcgtaatgcccgctgtcctgccgttctcgtaccgcacttctttgattttttcatttgtgcggatggtgacgttcagttgttttaatcggttcaaaagcgcatcgacaacgctttgcgctttgtccgtcaccgggaacatgcgcccgtggtcttcttctttcagctgaatgccgagtttttcaaaaaaggcgatgatatcttcattattaaattcggaaaacgcgctgtataaaaagcggccgttgccggggatgtgtttgatgatttcttcaacggggaggcggttggtcacgttgcagcgcccgccgccggaaatcgccagcttccgtcccagcttgtttcctttatcgattaataatacgtccgcgccttcttcgcctgccgcaatcgcagccattaaaccggacggaccgccgccgatcacaatcacgtcataatgtttcatctttcatcaacaactttctttttcacgtataataggcggaaatgtccgctttctgctattatagcgaaagaaagggaatccttaaacgtattttgttttttaaagagttttcccaaaaagtttcccgctgtaattattaccgtctaattgcccagttgtgttaaaatagaaaagttgaatcttcgtagaaaatggtgatgaggaaacatgtcaagcaaattgttaaggggcacgttcgtgctgacgctcggcacctatatatcgcggattttagggatgatttatctgatcccgttcggagcgatggtcggagcgacgggcggagctttgtttcaatacggatataatcaatatacactgtttttaaacattgccacgatgggatttcccgccgcggtttcaaaatttgtctcgaaatataactccaaaggagactatgagacgagcaggcggatgctgagagcgggaatgtcggttatgctcgtaaccgggatgatcgctttttcaattctttatatttcggcgccgttttttgcggaaacatctctcggcggcacgagtaacaacggacttacgattgaccacgtcgtttatgtcatccggatggtcagtctggcacttttggtcgtgccgattatgagtcttgtgcgcggttttttccaaggtcatcagatgatggggccgacagccgtttcacaggttgtggagcagcttgcccggatcatctttttattgggcgcaacgtatttgattttaagagtgatcaacggcggccttgtcatcgcagtcggatacgcgactttcgcggcgctgatcggatcattcggagggcttgtcgtcctttatatttactggaataagcggaagggcgatcttctggcgatgaagccgaatctcgtcccgtctgcgaacttaagttataaaaaaatgttcattgagcttttcagttatgccgctccttacgtatttgtcggactggcgattcctttgtattcttatatcgatacgaatacgtttaataaagcgatgattgcggcgggccataaggatatcagccaggacatgcttgcgattgtcaccctttatgtgccgaagcttgttatgatcccggtttctctggcgaccgctttcggtctgacgctgattccgacgattactgaatcgtttacgagcaggaattataagcttttgaaccagcagattaaccagacgatgcaaattattctgtttttggttattcccgccgttgtcgggatgtccgtgttatcgggcccggcctatacgtttttctacggctctgaaagtcttcgcccggatatcggacaggatatattgttctggtacgcgcctgtcgcgattctgttttctctgtttaccgtaaacgccgcgatcctgcaagggattaataagcagaaatttgctgtcgtgagccttttcatcggcgtcattataaaagtggtgctgaacgtgccgctgatcaagctgtttcagggagacggggccatcttggcaacggcgctcggttatatcgcttctcttctgtacggttttatcatgattaagcgccatgcgggctattcgtatacggtacttataaaacgggtcattttaatcgcagtcctgtccgtcgtgatgggagtcgcggtcaagctgactcaatggctgctcagtttctttgtaacataccaaagcggccaggtgcatgcggcgattgtcgtctttgtctgcgccgctgtcggcggtgcggtgtacatgtttgccgcgtaccgaatcggatttttacagaaaatgtttggaaatcgtctgccccgtgttttgaggagaggcaggcattccgcccattgagaaataatgaatagtccgcttatcgcgggcttttctttttaaaggagaggatcaggatgagacttgataagctgcttgccaacagcggattcggctcaagaaaagatgtgaaaaaaatcgtcaaggctggggctgtcatgattgacggagagccggcgaaagatgtgaaaacccatgtcgatccggaaaaacaggacatcacggtatacggagagccggcagactatcgtgaatttatttatgtcatgatgaataagccgcaaggagtgctgtccgctacagaagacagccgccagcagacggtggttgatctgctgacacctgaagaacagcgatttgaaccgtttccggcaggacgtcttgataaggatacggaaggctttttgcttctgaccaatgacgggcagctcgctcatcgcctgctttctccgaaaaagcatgtgcctaaaacatatgaggtccggttaatttcacctctgtcaccggaagacatcgttcatctggaaagaggcgtcgtcattgaaggaggctataaaacgaagccggcagccgttgaaatcattacagaaagcccggatgaaacggtgattcatttgaccattacagaaggcaaatatcatcaggtgaagctgatggcaaaggctgtcggaaatgaagtggcttatttgaagcggctttcgatgggggctgtttctcttgacccggatcttaaaccgggagaattccgcgagctgactgaagaagagctcgaaacgctgagaggcgctgaagtgtaatcgatatcagaaaagcccaaaacagatttgttttgggctttttatatagaggaacaaaaaacaaggcaaagacgctgctttgccttgcagcatgtcaggccgaaaagggccttatgtaattgttcgcttaagatgtaattttcactttttttcgtgttgtctcccacttgcctcggctaggactatgaacaagatcattgtatgctaacacatttaagtctcgctgaatggttctaggtgtaatgccgaattcatcaaccagttcctgtgttgtcacaaggcctttttcctggatgaacatgtaaactgatttaatccgagtcagcatacgatttgttgaaggtttcaaaaaaccactccctatcataagatcggatggacttgatataccacaactttcgactctaaaacttcgtacgaataagcaacaaaggatgacattctgttttttctcttttaactgcctccattatacacgatatggacaacatgaatctaggaataagcgcagataattttttccaaatgggtgccgccttggtgcattactatgcccggtccgcttttattattatggaaactgaaactttttttatacatgtccgtatgaaaacgggggagtgagaagtttgggagaattattgaatgcaaacattgtctgcgccggttatgctgacaggccgaaggtgatttctgatgtatctctgtcagtcaatgcgggtgaaattgccggtttaatcggagcgaacggcgcggggaaaagtacagtgataaaggcggttctcgggctttcccgggatatagaaggcggtattgagtggaatgattcatcttatgcttacataccggagcgtccgagtttttatgatgaactgacgctttgggagcatctcgagctgaccgggtcattgcggggcatggaaggggaagagtgccgtgaacgggcagggcggctgcttgaagagttttcgctgacgtctgtaaaacatgatttgccttccggtttttcaaaagggatgcagcaaaaattgatgctcatacaggcatttttggcgaagccggatatttacatcattgatgagccttttatcggacttgatccgatctcaacgaagctgtttaccgacatgctgattgctgagaaagaaaggggcgcggggattttgatgtgcactcatgttctggatacggcggaaaaaatctgcgaccggttttatttgctggatcagggcgctctgcttcttcaaggcacgttagaggagcttcaggaaaaaacggggagccgttcactgctggattgcttttattcagcggttcggagcagtcagcgatgaccgggcgggctttgttttttcaaaggctgtttcattattggcggtatcaatggaaggtgtttcagacggtcattgattggacggtcgcgctgtatatcgttcttcccgctgccgcatttgccgtttatcaatatgctgaatggctgaacggcagggggcttcttaatggagcggcaggagtattaggatggggctggctgtatgtattcagtgccctgctgttgtgcacgggttttattcatacctttttgctggaagcggatcacgtatttttggtgcatgcaaaacatctgatgcaaaagctgaaacggtacgcgcttttgtattcgatgttcctttcccttatcaaatggggtgcgcttgccgtattgttatttcccttatggcgccaatacggtgactgcaccttaccggcatattcgggtatgttttgctgtctgttcggcttccataccgcaatattagcggtgcaccgacacagaaaaaacagcaggcggacattcgggaatcaggcggcgggctggctgaaagtgatggttctgatggcgggtgcgttttttatgatcgtctttgccgccgaatggtattggctttggccggcgggatgtatattgttcatctgttccgctcttttgacttggaaagggacggagacattatcggcctttgaggaagaagtgcttgaggagaacaggcgcaagctttcactcgcggcctctgttttgatgctcagccatgatgtgcagctcccgaatggtaaacataaagggcggagcaagccgtttttatatcccggctcaaagcacatctttacaaaacggtcggcgtatacggcgtggaaagaattgttctttaaagtgctgattcgaaacggcgggtatctccggcagctttaccttttaaccgcggcttttacggctcttattctcgttcttccgctcttagtgaagccggcagtcctcattttgtttgcgatcgtcagccgctatgccgcgtcacttttatttgaccggatcacggataaaccggttttaagcggtatcaagagagacagtgatgactatttcagggcgcgaaacagcgcattaaccgtcattcaaatcatctgttccgcctggtgtctcattgccgcgattctttccgttctttatatgtgaaaatccctttccgaaaaaggaaagggatttttcttaatgtccgttcaaaataaaaagctgaataaaaaacagcacggcgaagatgatgactaaaggatggatttcgcgccattttttcttagctgctttaacaagcggatatgaaatgaagccgagtgcgattccggttgaaatactggacgttagaggcatcgccaaaatgacgagaaaggccgggaacgcttcatcaagctcattccagcggatattcgataccgcacccatcatcaggctgccgacaataatcagagccggtgacgtaatcgcggacacttccgataagacgctgacaagcgggctgaaaaacatggaaacggcaaacataacggcaatcgtcagcgccgtcagacccgttcttccgccggccgccacacctgctgaagattcaacgaacgcggtcgtcgggctggtgccgaagatgcttcccaccgttgtagcggtcgaatcagccaaaagcgctcttctggcattcggcagctgattgtttttgatcagtcccgcttgttcggcgacaccgatcatggtgccggtcgtgtcaaaaatcgtaacgagaagaaaagaaaacacaacggcgtacagaccgtgatgcacgacatccccgagggctccgaacggatttgtgattaaaagcccctccggcaggtgcgggaaggacatgaatcctttcgcgaaatgaatctgcccggtcaaaaaggcaatgacggcggtcagcgccattccgatgaacagagcaccgttaacattcagcaccatcagtacaatactgatgataagtccgataagcgttaaaatgacggcgggcgaatgaagatcgccgagtgcgaccagattagatttatcagccgtgatgattccggattggcgtaagccgataaaagcgataaataagccgatgccggtcgtaattccgtattttaaattgtccggaatcgcttctataagttgttttcttaaaggcgttaacgataaaataataaagatgactcccgcgataaaaacggcgctgaaagccgtctgatacgtaatgccgctgcctgtgccgacaacgtgaaaggcaagatacgcgtttaagcccatgccgggggcaatggcgatcggaaaattcgcagcgagagccatccataaagttccgacaatggaagcgataatcgtcgcggtgaacacctggtcaaacggaattcccgcattggaaaggatcaccggattgacgacaatgatatacaccattgtgaaaaaggtggtcaatcccgcggtaatttctctttttattgtcgtttgatgcttgtcgagatgaaacataagtacctccaatgacgaacattttttcaaaacatcatctatattattcgttttatcgacattttgcaagtctttatcaagaaaggggatttgtgatgaactgggaagttgaagtcatcagaaacaaagaagatctgatccgtgacacgcagaagtttttgcagatcaacagcgtaatggacgaatcaacagccggtcccggccggccgtttggagaaggcgtcaatgccagcctgacgtcactgctggaattcggtgaaaaagaaggcttcaccgtaaagaatcttgatggctatgcgggccatattgaatggggaacgggtgatgaaatcgtcggcgttctgtgccacgtcgatgtcgttccgcccggagacggctggacgagcgatccgttttcagctgatatcagggacggccggatatatgccagaggcgccatagatgataaagggccgacaatggcggcgttttatgcgctgaaaatcgtcaaagacatgcagctctctttatccaaacgcgtgagaatcatcatcggaacggatgaagaaagtgattggagatgcgtggatcactacttcaaacacgaaaaaatgcctgacatcggctttgctcctgacgcggattttccgatcattaacgcggaaaaaggaattatagatgcgtcactgcgcattgcaaaaagcgcttctgacaaagacgcaaaaaacgggcttctgtcattccgttcaggactgcgcttgaacatggtgccggatgcggctgaagcggttattgaaggggacggtcttgatgccgtgcacgcatatttcagcaaatggcttgagcagtcaaaaacacaaggtgaagcaatttcggaaaatggaaaactgacgcttcgggtatacggaaaatcatgccacgcgatggaaccggataatggtgtcaatgccggcttaaagcttgctgaatgccttaacggaacggagctggatggagccggaaagcactttgtcaaaaccgtcagtgactattttttaaatgatacacgaggcaaaaagctgaaaattgattgcagggatgacatcagcggagagcttacattgaatgtcggcacctttacatacagaaagggtgaggaaggagaactcggcatcaacatccgttatcccgtcacttcagacagcaatgtcatccgtgatgcttttacgtctgctgaagaattccggcttgaagaatttaaagacagcaaaccgcaccacgtttctgccgatcatccgctcgtaaagacgcttcaaaaggtttacgaaggacagacgggaaagaaagcggatctgatttcaatcggcggaggaacgtatgcgagatccctttcggcgggcgtcgcgttcgggccgctgttccccggccggcctgacagcgcgcatcaaaaggatgagtacattgaaatcgatgaccttctccggtcaaccgctttatacgccgaagccatttatgagcttgccaagtgataataaaaagggacgccgaaagcggcatccctttttatcattcaaatgaccataaatccgttgataaataacgttctcccgtatcggccgtcatacagatgacgatctgttcggaagggaggcgttttgcggtttcaatggcggcgaagcaggcggcgcctgaagacgggccgacgagtataccttcttcccgggccagacggcgtgttgtcgtatacgcatcttcatcagatattttcatgatttcatcgtaaacgtcctgattcagtatgccgggaataaatccggggcttgtcccgacaagcttatgagcgccgggttttccgccagacaggacgggagatcccgcaggctcggcgacatgaacaatcatatccgggaaaagctccttcagcgtttctccggttccggtaatggttccgcccgttcccgccgttgccacaaaagcaccgagcggtctgttgagctgctgaacggcctgatagatttcaatggcggtcgtttttcggtgggcatctggatttgcgccgttatcgaattgcatcgggataaaacttcccggaatctgttcggcgagttctttcgcttttttgatgctgccgggcattctttccgcccccggtgttaacacaacctccgcgccgtacgctttcaggaggttgatgcgttctttcgtcatcgtgtcaggcatgacgaggattgccttgtagccgcgcgccgccgcgttcatcgccaggccgatgcctgtgttgccgcttgtcggttcgatgatgacagagccgggttttaaatgcccgctgttttccgcttcaatgatcatattgtaagccgctctgtctttgacactgccgctcgggttaaacgattctaattttaaatagacctgtgctgcatgttctggctgaagacgattgagctttacgatcggtgtgccgccgatcagctccgccgtgctgtttacgattttcaaggccggctcattcctttctgtataaaacgttcggtacataatatcctatcataatgagcggacagggttctcctctccgcttatccgttttataataacaccataaccaaagagggggagatcctcgtatgaaagcttcattgccgcattattttatcggcattccgattccggctgacattgctgaaccgatttgggaagcagccaaaaaggagccggcgttatcattcaaaaaatgggtgcacccgcatgactatcatattacactcatttttctcggagccgcggatgaagaacggcttgcgaaattatcgtcgctgctcgcagatgctgcgtcggcagcgcagccgtttaccgtacagtttcagcatctggatattttcggcgaccgcagacagccgagagtgcttcaccttgagcccgaacggaatgaactgctctttgatttgcgggaaaaaacaaaacaggctgttttgaaagccggttttcaagtggaaaaacgcccgtatcaccctcatatgacgatggcacggaagtgggcgggagaccggccgttttctgacgatgtgccgtttgaaagcggcagggtgcaaagtgccgtcagccggttttccctgtttcagacccatcttgaccggtcgcctaaatacgaagaaatcgcacagtttcaattgacataaacaaatattcggagtggagaaatcacatggcacagatcatcaaaattcacgactgcatatccagatatgaacttgatccatatcattatatgaaccagtttatccggctgaagaaagaacgctgggaggcgcttcttgaagcgtttgaccggaagacggaagaaaaagaaacgaaaacggctgccggcggggaaaccgatcaagcgccggccaggaaaaaattttccttaaaaaagagaaaagaagaaaatacggccgatataaatgaaaagaggcaccaatggtttgatgagccggagggagaagaggcgctgttcgggaatcttccgtctcaaaagtctgagctcgcgccttttttcaaagatcagctgtatgactttcaattaaaatgggcgagctccacgctttctcaaaagtctgagctttcgcaggcggtcaaaagggacgggatgttaaaaatgctggctcaaaagctgcccgattcctattttgtgatgtatcatccggttcttcaaattcagcaggcgtccgtcgaactgagcatgatcatcatctcgccgctggagattttctgcgctgcttttatggaagcggaagaggacagcgtatatatcggatcaaaacaccgtttttgggaagaaagaggctccggcagcacgcgccaagtattgaatccgtctctcagcctgcaccggacgggctcggtcgtttcgcaaatcgtaaaagaaaagcaggccgacattcccgtgcggaagcttttgctcagcagaacgtcttatattgattatccggagccgccgtacgggctggaaatagctgataaacggactgccgcagagtggctggaaaagcagcagaaaaatacggcgccgatcaagcaccaccagctgaaggcggcgaaggctcttttgtcttacggcttgagcgattcaagccggagacaggaatggcttgattaaaacggacgtttgccggctgtctcttcatctatgaagcaggtgaaaacaaacgatgagtcaatggttttttattattaatccggtctcaggaggcgggcggggccggcgtgtctggaaatcagttcaaaaagagctgaacaggcgcggggtcagccaccgctcttttttgaccgggcatcccggacatgcggaggtgctggcgaggcagatttcaatgatgcaggatcataagcttaagcggctgttcgtcatcggcggtgacgggacgatgcatgaagtcattaacggactgaaaggaacggatcagattgagctgacctttgtgcccgccggttcgtacaatgacttttccaaagggctcggtattaagaagtcggcgcttctccaagaaatcaaaagtctgcaccgcccgctcacgcggaaattttttgcgggaaacatcaacttttttcatgacaaagcgcaatcactttattttattaaccacctgtctgtcggcttcgatgcctcagttttgaaggcaacggcgaattttccgttttcgcgcgttcttcggtttttgcgtctcggctttgtgatttacccgctcgcgcatttacatacggcctcggggtttcagccgttcagatttgtttgcacggcagacggccagaggcgtgaattccgcaatgtctggtttgtcattgcggctaatcacccttattacggaggcggcatgaaagcggcgccttcagcaaatccccgtcaaaaccgttttgatattgtcatcgcagaaaacctgtcctttttctcgctgtatcgttttttatgggcgatgagcttcggccggcatatcaaaatggacggagtgacgatgataaaggggaaggaattcgtttttgaaacagatgggaaaattccgtttcacgctgacggcgagctgatcggaacgacgccgtttcggcttatgccgggcggtgcgccgttgaaaataaaaacataataaacaaatgaaacccgtcaaatgtttcacggcaaagagcggttcgcggcataaatcttcagaattcacaggtgttcttgctagttttgcttgacgaagtttgtgctgtagcgctaaaatttataggacggctattgattagcatatgagactctcaatagctgtcttttttattctcatgaaattgtttatgacaggccgctccgccaatagagaaaggctggaggcctattctaaaatattttaagaaatgatgggttgaacattgatatgaactggttgggacaattactaggtagcgattgggagatcttccccgccggaggagctacaggagatgcatattatgcgaaacataacggccaacagctttttttaaaacgtaatagctcgccctttttagccgtgttatccgccgaaggcattgttccgaagctggtttggacgaaacggatggaaaacggtgacgtcattacggctcagcattggatggcgggcagggagctgaaggcaaaggatatgagcggacgcccggtggctgagctgctccgcaaaatccacacatcaaaagctttgctcgacatgctgaaaagattgggaaaagaaccgcttgatccgggcgcccttttgtcgcagctgaagcaggccgtctttgccgtgcggcaattttcgccgcttattcaggaaggccttgcttatttggaagctcatgtggatcaggtgcaattcggtgaaaaagtcgtttgccattgtgatgtgaatcataataactggcttctgtctgaagacaaccagctgtatttaatagattgggacggcgccatgatagctgatccggctatggatctcggccctttattgtatcattacgtcgaagagccagcgtgggacagctggcttgggatgtacggcatgaagctcacggaagggcttcggctgcggatggcatggtacatgttatcggagaccatcaccttcatcgcctggcacaaatcaaaaggaaacgacaaagcgtatcatgatgccatggaagagcttcatgccctgatgaagcggattgtcaagtagtcaggagtacgaatccatctgctccacccattgggacaaatggttttggtgctcctgaatatgcgtgtcgatggaatcggccgtgatgccggactggctgtagcggtagacatcctcgagcacgttttttatatttgaatcaagcccggtgttggccatcagtgatttgatgacgcgctccagctgttcatactcggcaaccgtgccgcagcaatccaattgatggtcggccagtatgtcctttaataaccggacctgatgttcgcttgttaagcccatgattcatatacacatcctttctgtgtcatacattgtgcaaagcggtgcggttttatgcatcacatgagtgttccggaccggggagcctctttttttatgcagccggcgcctttaaaaggcgcttgcggctctttatgtttcatggtatgttgttactcgaaattatagatagaggtgtcaatcatatgagaatgcgccataaaccttgggcgaatgattttctggcagaaaacgctgacatcgccatcagtgatccggcccagtataaagggcggtggaacacggtctttggcaatgacaacccgatccatattgaagtcggtacgggaaaagggcagttcatttcaggaatggccaagcagaatccggatatcaactatatcgggattgagctgtttaaaagcgtcatcgtcactgccgtccaaaaagttaaggacagcggggctcacaatgtccgtttgttaaatatagacgcggaaacactgaatgacgtatttgaacggggagaaatcaagcgcgtatatctaaacttttctgacccgtggccgaaaaaccgccacgaaaagcgccgtttaacatttaaaacgttcttgaaaaaatacgaagaagtgatgggcgaaacaggtgagattcattttaaaaccgataaccgcggtttattcgaatactctctgaaaagcttttccgaatacggcctgcttctgacggaagtcagccttgatctgcacaacagcgatccgaagggcaatattatgacagaatacgaagaaaaattctccgcgctcggccagccgatttaccgggccgaagttgaatggagaacaaaagacagactctgatgcgggagtctgtttttttatgccgccatttgctaccattacatcaggagggatcaagatggagacattgaatattgggaatatttcattaacatggctggacggcggtgtaacacatatggacggcggagcgatgttcggcgttgttccgaagcctttatggtcgagaaaataccccgtaaatgacaaaaaccagattgaattaagaacagacccgattctgatcagaaaaaacggcctgaatatattggttgacgcgggtatcggccgagggaagttctctgataaacaaaaaaggaattacggcgtaacacaggaatccaatctgaaacaatctcttcgtgacctcgggctttcctgtgaggacattcatattgccgcgatgacccatcttcattttgaccatgcatgcggcctgacggagtacagcggagaggagcttgtctctgttttcccgaatgcccgcattatcacttctgcaacagagtggcgcgaaatgagaaatcctaatatcagatcgaaaaatacatattggagagaaaattgggaggcggtacaagatcaggtcgaaacctttgaaaacgagtatcagctgacagaaggcattacgatgcaccacaccggcggccacagcgacggccacagcgtcatcgtcttagaagacgaaggggagacggctgtgcattttgccgacctgatgccgacgaatgcgcataaaaatccgttatgggtgctggcctatgatgattatccgatgacctctattccagaaaagcagaaatggcagacgttcgcggcagaaaaagacgcctggctcattttctatcacgacgcgatttacagagcggtaaaatggggagaagatggcgaagtggccgcgtctgtcaaacgggagaaaaaataagcggatcgatgatttgcctgtatgaatttcgggaataaaagcaaacctaagacaaattgctttgaaaggaagagacaggtgaatcaatttcaagtgacgaaagatggagaaatcaaaacaacactgcgcggattagaagtgctttctacgccttttttaaataaaggggtggcctttacacaggaggaaagaaaggaactcgggctcgagggatttctgccgccgaaagtattgacaatcgaagagcaggcgaggcgggcctacgaacaattcagttcgcagcctgatgagctgagcaaaaatgtgtacttgaccgctctccatgatcggaatgaaacgttattttacaggctgttaaatgatcatttaggcgaaatgctgccgatcgtatatacgccgaccgtcggcactgcgatccagcgttacagccatgagtacagaaaaccccgcggtctgtatttgtcaatagatgaccctgaaggaatgcgcgccgcatttcagcagttcggaaaaaatgaaaacattgacttaatcgttgccacagatgcggagggcattctgggaatcggtgactggggcgtcggcggcatcgccatttctgtcggaaaactcgcggtttatacggcggcggccggaattgatccgtcacgagtgcttgcggtcgttttggacgccggaacaaatcaggaaagcctcttaaatgacccgctgtatgtcggaaaccagcattcaagagtgcgcggcgagaaatatgaccgctttattgatgagtatgtctcgcttgcccgggaaacattcccgaatgcgctgcttcattgggaggatttcggtacggctaacgcccgcggcatattaaaacggtataaagataaagtctgtacgtttaacgatgacattcaaggaacgggcgcggtatcgcttgcagctgttttagcgtgtgcaaaagcatcaaaagtgcctttaaaagagcataaagtcgtcgtcttcggcgcgggaacggccggtatcggaattgctgagcagctgcgcgaagccatggtgcatgacggattaagcgaagaagaatcctacagccatttttggtgtatcgacagaaacggattgttaacggatgttatgaaggacttgcgtgattttcaggttccgtacgcgcgccctgctgatgaagtgaaagagtacggccgcagcggtgaaggcggatcaattgatctggcggagactgtgcgtcaggccaagccgacgattctgatcggcacatccaccgtatcaggcgcatttacggaagaaatcgtcaaagaaatggcctcgcatgtcaaacggcccgctattttgccgatgtcaaacccgacgacattatcagaagcaaaacctgaagatttgattaaatggacggaaggccgcgcgcttgtcactacgggtagtccgtttccgcctgttgcgtataacggcgttacctaccatatcggacaggcgaacaacgcgctcgtattcccgggactcggactcggcacgattgtgacaaaagcaaggctcattacggacaatatgttcgttgcctgcgcgaatgccatcgccggtatggtggacgtcggcaagccgggggcgccgatgcttccgaaagtggaggatctcaggacggtatcggcaactgtggcggtagctgtagctaaagctgccattcaggacggtgtagcggaaaaggaacccgaggatctgatccaagcggtgcaggacgcgatgtggcaccccgtatataaacgaattcggccgatgtaaccgaataaagcccaaaacgctgatggttttgggctttattttttgcttgtccgaattatgaggcgacagaatcaatgacatcgacaatctggcctgtttttgcattgaccataacttcatattgctccagttcgccgaatgccgaacgtgtcacgccggttttgtatacctggatggtttctccgtttacctggtagggctcgggctctgtgtaaatccatgatccgtctatcggcccgcgctgtttaaaagccgctttcacgatacggagcgctttttctgaagagatataaggtttcatcgcatactttttcactgcgatggcagcgcataatccgactcctgcacctaagagaaaatgacgtaatttcaatatgaagcacctccaattatgtcgtagtttttattatacagaagatgccagacggtgttaagtaaagcggcggttttccagcccattcaatctgagcgcttggaaaacggttgtttttctaataaaataaaagcattacatagaaatgaggggaaaatatgaatgaggaaacgaaaacgcttttccggacgctgacgcagcttcccggcgcaccgggaaatgaacatcaggtccgctcctttatgaaacgggagcttgcgaaatatgcggatgacatcgtgcaggacagactcggaagtgttttcggagtaaggcgcggcgctgaagatgcgccgaccgttatggtagccggccatatggacgaagtcgggtttatggtaacgcagattacggataacggcatgctgagatttcagacgctcggcggctggtggagtcaggtgctgcttgcccagcgcgtcgaggtgcagacggataacggaccgattatcggcgtcatctcaagcatcccgccccacattttaacggatgcccagcgcgcaaagccgatggagatcaaaaatatgatgattgatatcggtgccgatgatagagaggacgcggtcaaaatggggatcagaccgggacagcaggtcgtgcctgtctgcccgttcaccccgatggccaacgagaagaaaatattgtccaaagcgtgggataaccgctacggctgcgggttaagcattgaactattaaaagagctgcacggaaaagacctgccgaacaatctgtacgccggggccaccgttcaggaggaagtcggtttgagaggggcgcagacagcggccaacatgattcagcctgatctctttttcgcgcttgatgccagcccggcaaatgatatgagcggcgataaggagctgttcggccgtctcggcgagggggtgctgctccgcattctcgacagaacgacggtcatgcaccgcgggatgagagagttcgtccttgatatggcggaaacgcacaatatcccttatcaatatttcgcttcaggcgggggaacggatgccggacgggtccacatatcaaacagcggggttccgtctgccgtcatcggcatttgttcaagatacattcatacaaatgccgctatcatccatgtcgatgattatgccgcggcgaaagaaatgctcattaagctggtcatggcgagtgacaaacagacggtcgaaacgatcagagaaaatgtgtaaaaaaataagcaggaccgcataaaggcggcctgcttattctgtttcaaataaataagagagtgctttcatcgcttgattgacggtttcgaccgtgatattcgcttttccggaaagctctttcagcggatgatgaagttctttcggacggatgagaatgagcggctttccttttgcgatggcataagaagcatccatcgcggtattccactgcttatatttctcgccaaacagggcgatcacaaaatcggctttttccatcagcacctctgtacggaaattgttgatatcagaagctctggcgtcttttaaaacagaatcgggctgcacgcccataatctcttctccgatattgtctgagcgttcatggttttccatcgggccgacaaacgtaatcggcaggtccagcgctgttgctttttgcttgatctcgtcccgccaattactgtggatttcacccgctaaatacacgacaaactgcatcttttgcccctccttatgtacatattcagattttcgtacggttacaagcaaaatggtaaacgaaacttgcttgataatgcaaatgaaatatgataatgatattgcatatagttggtcttgctgtaaacagtctggtatgatccaattggacaaacatcagcatataaaaaactcataatccagatggaggaatgacaatgaaaaagattgaaagcacggaagaattgcaaaaagcggtacaagacgattgggcggtatttatgttttcagcggattggtgcccggactgccgctttgtggagccgtttctccctgagctggaagcggactttcctgaattcacttattactacgtagaccgcgatcaatttattgatacatgcgcggaatgggaaatttacggcattccgagctttgttgtgtttaacggaggaaaagaagtgaaccgcttcgtcagcaaagaccgtaaaacaaaagaagaaattgagcaatttttaaccgattcccttgctaaagcataaaggaggccacgggctttgaaaatgacgtcaaggaagctggcggatttattaaaacagcgcctgcagcacgagaaccgatccttcttttttgacagagaaaaagacaccctccgtgttgaggatcaaacgaccaaaaaaggcatcacattggagctcccgcctatcattgcgaagtgggagacgaaaaaagaagaagcgatcgacgaaatcgtctactatgtgtcagaagcaatggaggcgatggaaggcagcggacaggagatgtccggaaaggaagccggaatctatccggtcatccgctccacatcatttcccgatcaaacgagcgacggcattccgctcgtgtatgatgaccatacggccgaaacaagaatctactacgcgcttgacctcggtaagacgtaccgcttaattgacagccgtatgctcgagaaagaaaactggacaaaagaacggatcagggagacggcgtcattcaatctccgctctcttccttcagttgtgaaacaggatacggttgcagacaattatttttattttttcagggcgaatgacggctatgacgccagccggattctcaatgattcgattcttcatgaatacaagcaggccgctgaaggcgaattggcgatttccgtcccgcaccaggatgtattaatacttgctgacattcgaaatgaatcgggttatgatattttagggcaaatgtccatgagcttctttgcaagcggcacggtgccgattacggccctttcatttctgtataatgaaggcagactggaacctgtgtttatcatggcgaaaagccggccgaaaaaggattagaaaggatttttcttatgaacgctttttacaataaagaaggtgtgggagatacgcttctgatctctcttaaagatgcggcacgcgaagaaatcgcctatgaaaaagaaggcgatgtcatcagaatctttaacaaagaaacaaaagaaacgacgggctttaacatttttaacgtgtcttcttacttacagattgaggacaacggccccgtcgctttgtctgagacattcgttcaggatgtgaatgaaatactgaacagaaacggtgtttcagaaacgctgacagttgacctttctccgaaatttgttgtcggtcacgttgaatcgaaagaaaaacatccgaatgcggataaactgaatatctgccaagtgaatgtgggagaggaaaccctccaaatcgtttgcggcgcgccgaacgtggacaaagggcaaaaagtcgtcgttgctaaagtcggcgcggtgatgccgagcgggcttgtgattaaagacgctgaattaagaggcgttccgtcaagcggcatgatctgctccgcgaaagaactcgctttgccggatgcgccggcggaaaaagggattcttgttcttgaagacagccgcgaggccggcgaagcatttcaattctaactcccataaataagcgcacagaatcgaatgatgtgagagaaagccgttaagcatgcctgcttaacggctttcttcagttgggagcttaatcttttctgagccgcccggcaatggtatactaaatatcgtcccagactactaaaaagggagttagagagtgattaaacatgagttggctgaataaattttttgacttatttttaggtgaaaaagaagaagagcatgaacgtgaaccaaacacgcatgcccaaatcccgaaacagcagataccggatcagccagaaggcaaattcacgcgcatggaagatcctaaaatatattacgaatatccgaaagggaatttccgcttccctgtcgttccggacggctataagcgaacggagcaaaaccaaagacagcgggaaaggcacgaacgccgccagccgtcccgggattatgccgccgggaaggagcaaaccgagcggaaacagcatacacataaagagcctgatacggtgaaaaagccctttaaaccgtcatccattccttcaccggtttacggctttcaatctcagcacagcataaaaaaagcgcctatatccgaaaagcggcgtgaagagaacgtaacattgctgtcagaggagcaatttgttccgccaaaagccggtcaggaaacggaaaaagagcccgtcttcacaacatccggcataacaaaacagacgaatgaccggccagaaccgtttgcgaaacaagaaacggaagaaatcccggccgttaaaaaagaggagcttcacaccgaggctgagaatgcaaaagagcaagtgtttgcagcagcagaaccgcagcagactgaagagcgggagcacacggaaagcgcggagtctgccggctttacagaagaacaagagcatgaacaaacccgcccgcagcctattaaagagcctgagtatgaagcatcccgaacggctgaaaacacagaggaacaagcggcgccgcaggaggaacatcaggagcctgagccggaaaaagcaccgccttttgaaaccgcagaagaaccggtgtatacatacacagaacccggatacgatgaggaagttcagccgcagtctgaagacaagcccgaatcagctgaaaccgacgcggaacaggaaacagactcgcagcctgagtacaatgaagtcacgcggcattcagacccccccgagcctgaacctgcaagcatcaagacggccgatgccccgtcccggcctgccgaagaaaaaacggagcatcacggacagcctcagcctgtgaaaaaagcggagcagccgaaagagcgcaatgttccgtttaacgtcatgatgcttaaaagtgataaacacaagcagacgaagacgccagagggcggagcgagctatgcctttccgaatctgtcgcttctggacgtaccgccggcgcaaagacatgacgaccaatcgtggattgaagaacagcgcgagcttttaaacgttacactgaaaaactttaatgtgcgcgcccaagtcgttcatgtcacacaaggcccgtccgtcacacgttttgaagtgcatcctgagcccggagtgaaagtaaacaaaattacaaacttagcagatgatattaaattgagcctgtctgccaaggatattcggattgaggcgccgatccccggtaaaaacacgatcggcattgaagttccgaaccgcgtaagcaaagtcgtcgatttaaggcagatgatcagaagcgccgctttcaggacgaatccgtctccgcttacagccgcgctcggtgtcgatatttccggaaacccggtcgtcattgatttgaaaaagatgccgcacgggttgatagcgggtgcgacaggatcgggaaaaagcgtctgcatcaataccattttggtcagtctgctttataaggcggatccgagtgatgtcaaaatgcttctgattgatccgaaaatggtcgagcttgcgccttataaccaaattccgcatttggtcagccccgtcatcacggacgccaaagccgcgaccgccgcgttaaaatgggttgtggaagagatggaacggcgatatgaactgtttgcccattcgggtgtgagagatatcggccgctttaatgaattaaccgccgatcataagacaggcgaaaagcttccgtacctcgtagtggtcattgatgagcttgccgatttaatgatggtcgcgccgaacgatgtggaagaaagcattgccagaatcgcgcagaaagcgagagcctgcggcattcatctgcttgtcgcgacacagcgtccgtctgtcgatgtcattaccggaatgatcaaggcaaacataccgacgaggattgcattctccgtctcaagccaggtagattccagaacaatcatcgacatggcgggagcggaaaagctgctcggaaaaggcgacatgctgtactgggaaaacggtaccggaaaaccggtgcgcctgcagggcaactttgtatccgacagagaaattgaccgcgtcgtctctcatgtcagaaagcagctgccgccttcttatttgtttgaacaggaagaactgatcaggcagggaaccgccctcaaggaagaagacgaactgtttcctgaggcgtgccaattcgtcgtggagcaaaacagcgccagcacctcaagccttcaaagaaggttcagaatcggttataaccgcgccgcgaggctgattgacatgatggaagccgaaggcatgatctcagaagcgaagggcagcaaaccccgtgaagtgctgattacggccgctgacattgctcaagaataagaatatcgttcatttttctcacaaacatggtatgatagtggatggaccatcaaaactgcatcactgtcacgcgctgaaatatcatgcggcaggtttaatcaaaaagaaagttacagatactgacgataacgtaaaaataaatggaagcgccgctgtgcgggctttttgcccgcggcggtcgcaaaatgaaatgagcgtcatatactggggaacagatagacgtttgttggaggtacgattatgactgtttatcattttgttggaataaaagggacaggtatgagcccgcttgctcaaatcctgcatgatacagggtatcaggtgcagggatcggatatcgagaagcagattttcactcaggctgcccttgaaaaaagaaatatcccgatctatccgttcagcgccgataacatcaaacccggcttaacggtaatcgccggaaacgcattccctgattctcatccggaaatcgcaaaggcgctcgctgaagggattcctgtcatcagatatcataaatttttagctgaatatatgaaaaaatacacaagtgtcgcggtaacgggcgcacacggcaagacgtccacaacgggcctcttggcacacgtgatgcagcaggcgaagccgacttcgtttcttatcggggacggaacgggcagaggaaatgaaagcagcgaatactttgtatttgaagcctgcgagtaccgccgtcatttcttgagctatcagcctgattatgcgattatgacgaatattgattttgaccaccctgattatttcgccaacattgacgatgtgtttgatgctttccaaaacatggcgcttcaagtcaacaaaggcatcattgcctgcggtgatgacgagtacctgccgaaaattcacgccaatgtgcctgtcgtgtattacggcacgggagaagaaaatgattttcaagcgagaaacatcgtaaaaaatacggaaggcacgacatttgacgtctttgtccgcaatacgttttacgatacgttctacatcccggcatacgggcatcacaatgtcctcaattccttagcggtcattgcaatctgccactatgaagagatagacgtgaacatgattaagcgcggacttgaatcattcggcggcgtcaaacgcagattcaatgaaaaagtgatcggcagccaggtattgatcgacgactacgcccaccatccgactgaaatcaaagtcacgattgaggcggcgcgccaaaaatatcccgaacgtgaaattatcgcggtatttcagccgcatacgtttacacggacgcaatcattcctggatgaattcgcagaaagtttaagcgcggccgatcgcgtgtatctgtgcgacattttcggctctgcccgcgagaacgtcggcaagctcacgatcacggatcttcaggaaaaaatcgataacgcagaactcattgaagaaaatgacacatcagtgttaaaagcgcatgaaggcgcagtgctgatcttcatgggcgccggagacattcaaaaatatatgagagcctatgaaaacgtcatagcgtaacgaaaaagcagtggggctctcactgcttttttgcgcgtgctgcaaagggatttaccgagaaacggagaaatagtatacatacagatctttcatatatgtttatcattttaagaattgggtatataccactatatcctgcattaaggaggtattagatgatcatcattctttacttaagcgtcgcactcattgccgttgcatttctcatcctcgtcatctatctgtccaaaacattaaagtccgtgcagatgactttaacaaacgttgcctcgactttagacggccttgaagggcagatgaaaggcattaccgcagagacaaccgagctgttacataagacaaaccgtctcgcggaagacattcaggaaaaatcagagaaattaaatacggttgtccatgctgtccaggaagtgggaacttccgtccagcagtttaatacatccataaagcaggcagcaggttccgttacggcctctgtaagagagaatcaggataagatcagtcaggttgtcacctggagccaggccgctatggaaatatgggacaagtggaagcaaaagaaaaaaacatcgctttaatcataagaaaaatccactaaggaggaatcataatgagcaaagatggaatcaatagtaaggattttttaatcggaacgctgatcgggggaattatcggcgcgacaacggcgttgtttctggcgcctaaatcaggtaaggagctgcgcgacgatctcggcagtcaggcttctgcgttaaaggataagacggacagaatgacggccgacgcgaaagaaaaaggctctcaatatgtcagcatcgccaaagacaaaacatctaatatcacccagctggtagctgatcagtcaggccagattatgaataaagtgaaggatttaaaagaccgttctaagagcacactaaccgagaaagccgaagagacgagaagcgaaatgcaggacacggcccaaagcatcaaggccgaagcggaagacgccggggaaaaagccggtcaggcaaatcgctgatcttcaataaggagagataaccgacatgacaaaacagctgatatcgtctgaagaagagttcaaaaatgccgctgagaaagaaaacacgctcgtgtttttgaaacacagcacaacctgcccgatcagccaagccgcctttcaggagtttgacgcctttgcatcggcgcattcggaagtgccttcttattacctgcaggtgcaggacagccggccgctttcaaactatatcgccgagacatacggcgtgaaacatgaaagcccgcaagtattcgtcattgcaaacggcgaagtgaaatggcacgcgtctcattcacaaatcacaaaaaacgcaatagagcagcacctttcataattgctggccgccggttgataccggcggttttttttttgaaaaaaactattgatcatttcagccggatcatgtaggatatcaatatataccgcttcaacgcataaaagcttaaaagcgtttttgtgataaagccgaatgtgaaaaaatttattatttcatattcctattttcgcataactgtagtaagatgcatgttaaccattaaaataaaacatagcatagaagggatgaaaaagatgagcaacaaggaattagagagcctaagacagcaggcagacgcactaaacttagaaatccttaaattaatcaatgaacgcggagccgttgtaaaagaaatcggtaaagcaaaggaagcacagggtgtcaaccgatttgaccctgtcagagagcgtacaatgcttaaccgcataattgaaagcaatgacggcccatttgaaaactcaacgatccagcatattttcaaagaaattttcaaagccggacttgaacttcaagaagaggatcacagcaaagcgttgctcgtctcccggaagaaaaaagcagaagatacgatcgttgatattaaaggtgaaaaaatcggtgacggcgatcagagattcatcgtcggaccttgtgccgtcgaaagctatgagcaggttgccgaagtcgcggccgcagcgaaaaaacaaggcattaaaatcctgcgcgggggcgcgtttaaaccccgcacaagtccgtatgatttccaaggtctcggcgtagaaggcctgcaaattcttaaacgtgtcgctgatgaatatgacctcgcggtgatcagtgaaatcgtaacgcccgcccacattgagcaagcgattgattacattgacgtcattcagatcggcgcgcggaacatgcaaaactttgaattgctgaaagccgccggttccgttaaaaagccggtattgttaaaacgcggtcttgctgcaacaatttcagagttcatcaatgcagctgaatacatcatgtcacaaggaaacgaccaaatcattctttgtgagcgcggtatcagaacgtacgaaacggcaacgagaaacacactcgacatttctgccgtgccgattttgaaacaggaaactcacttgccggtgtttgttgacgtcacacattcaacaggccgccgcgatctcctgcttccgacagcaaaagcggcgcttgcgatcggcgctgacggcgtgatggccgaagttcaccctgatccttccgttgccctttcagactctgcgcagcagatggatatacctgaattcgagaaatggctgaacgaattaaagccaatgctgaaagtaaaagcataatacaacgttccgctctttaaaggccgccacgcgcggcttttttttcgtatcttcattttatttaattataaaatgaaagtgaacgttttcatcactgggaaaaacgtgtataatttcatgagagatatttaaatttgatgaataatgaaaaataatgtacactactgacttacgcttacaatcataaacgacagaatgcgaaatcgtacgacatttctttacataaagtgtttatgctatagataaggataagtgtatccagtaaaaggagtggtttcagtgagcaacattacgatatacgatgtggccagagaagcaaatgtcagtatggcgactgtttcccgcgtcgtgaacggcaacccgaatgtaaaaccgacgaccagaaaaaaagtattggaagccattgatcggctcggctatcgcccgaatgcggtggcaagagggcttgcaagcaaaaaaacgactacggtcggcgtcatcatccctgatatctcaagcattttctactctgaacttgcgcgtggaattgaagatatcgcgacgatgtacaaatataatattattttaagcaactcggaccaaaatcttgagaaagaactgcatctgttaaatacgatgcttggcaaacaagtggacggtatcgtatttatgggcggcaacattacggacgagcatgtcgaagaatttaagcgctctcctgtgccgatcgtcttggcggcatcagtggaagaacagggcgagacgccttctgtcgccattgattatgaacaggcgatttatgatgccgttaagcttttcattgataaagggcatcgcgatattgcactcgtctccggaccgatgcaagagccgatcaaccgttcgaaaaaactgcaagggtacaaacgggcgcttgaagaagcggcgattccgtttaacgagcaattcgtagcggaaggcgattacacctatgattccggtatggaggcgcttcaaagcttgatgggccttgaccggaaaccgacggcgattctttctgcgacggatgaaatggccctcggcattatccatgcggcccaagatcaaggtctttcgattcctgatgatcttgatattatcggttttgacaatacgagattgagcctgatggtccgccctcagctttcaacagtcgtgcagcctacgtacgatatcggcgccgtggcgatgagacttttgacaaaactgatgaacaaagagccggttgaagagcagatcgtcgaattgcctcaccgcatcgaattaagacaatcaaccaagtcataaaaaaacggaaaagcaagcttcactctgaggggtggaatcttgcttttttacttgagtaaggagaagatatgaaacgttttgattatctgacgcccgttggctttatgttaggctgtattattgtcgcaatcggtattctgtcagggacgggactggcgggaatcagttcatttttagatctgacttcttttttaatcgtcacaggcggccttgctgcggcgatctttatcagctttccgccgagggatttaaagaaaaccccttctgtactgaaacaggtattctcccgtcaggatgacaatgtgaaagagcttgtcagagtatttgtcagcctttcggagcaggcgcgcaggcaggggcttctgtctctggatgaccaggcgcgtgagatcaaggatccgtttttaaaaaaagggcttttgcttgcgattgacggctgggacgaggaaacgatccggctggtgatggattctgagatcgccgcgatggaagaaagacacagaaaaggaagacgcgtttttgaaaaagccggtgatttcgcacccgcctggggaatgatcgggacgctcgtcggactcgttctcatgctcaaaaacttaaatgacccgcataccctcggaccgaacatggccgttgcgctattgacgacgctgtacggagcgctgcttgccaacttggtatttatcccaatcgcggcaaagcttgaagaaaaaacggaaagtgaaattttcatcaaacaggtcatgatcgaaggggttgtcggcatccaatcgggcaaaaatccccgcaacctcgaaagtcagctcgtcgtcttcagctcaagagaagactggcgtaaaggacagcctgcgaacaagaaaaagggcgctgtccatgaagcttagaaaagagcgttttgaaagaagaaacaaaccggaacattccggcggttcaccgagatggatggtgacgttcgctgacttgatcacgctcattctcgtgttctttatattgcttttttcgatgtcgcaaatagacgcggaaaaatttcaatctgccgtttcatcgattcatacaaaaggcagcgggggtgaaccggcgtcatcagacaaagcaaacgaaaataaagaacaggatttgctgttacaaaacgtgaagacatacataaaagcgcatcatttgagttcgaaattgacggcgaagcgcgatgagcgcggagtggttctggtgctgcaggaggccgttctgtttcagacgggaaaagcggatgtgctgaaaaacgccgagccggttctgcatcagatcgcggtgcttttaaaaacaattccgaatgacatacaggtagaaggccatacggacagccgccggatttccacctatcaatttccgtcaaattgggagctgtcgtctgcaagagcggcgagtgtgatccggtattttaccgcgaatgaagacttttccgccaaacggtttatctctgccgggtatgcggatacgaaacctgtgaaggacaacaaaagtcccggacatatgaaagaaaaccgccgtgtagaaattgtgatcaaaaaaacgacctcctcataaggtcgttttttatttagttttataccgctgctcagaccggatggcaaaaagtgctttttccacggtttgggcatttttttctgaaatttcttctttgcggggaatcggaggatataattgttcaggatcactccaaaaagcgggcaacgtgcagggggagtgcttctgccatttatcaatccatttctgcggtatgcgctccccgggatcaatccctttcatctcaagccaaatgcggctccacgctctcgggacgactctccaaatatcgtatccgccgccgccgaccgcgatccatctgccgctgcaatattgatgggctaatgaatgagcaagccgcgggatctcctgataaatggagattgtattggacaggtgtgtcaatgggtcgtaataatgggcgtccgcaccgttttgggtaagaatcacatccggcttgaaaaaagccgcgatttctgaggcggccgtattgtaagcgtgaagaaaggaatcgtcctctgtgaaagcgtccagcggaatgttaaaagaatagccgtagccttgcccgcttcctttttccagtacttgtcccgtcccgggaaataaataacgcccggtctcgtgaaaagaaacagtgcagacatcagacctgtcgtaaaacgtaaattgaacgccgtcgccgtgatgagcgtctgtatcaatgtataacacttttgccccgtagttcttctggatgtattggatggccacggcgctgtcattatagatacaaaagcctgaggccctgccgcggaagccgtggtgaaggccgcctcctaaattgcaggcgtggctagcttgtcccgtcatgacataatcagccgccgttaaggtgccgcccaccagaagtgacgcggcttcatgcatgccggcaaaaacgggggtgtcttccgttccgagaccgtagctttctccttctgcggcagggagccggcccgcacccgctagttccaccgcctgtatataatcctccgtatgaacgagagccagctcttctttagcggccgtgcgcggtgtgacgatatctccttcgtcaaacgcatccgccgcctgaagcagatcgtatgttaaaagcacacgacgctgattgaacggatgttcctgatgaaattgatacgtctgataagaaggcgagtaaacaaaaacgctgtctctcatggctgatccctcaaatgtttcggccataagacattgtatccggcttcttgaacggcacggataaaagggagcggattcatcgtcttcacccggaagacgagaatgttcgacccggcggaatcatggggatagacgagcacactcaggatttgcagctgaagatcacggcacatgcagctgagatcagcaaggctttttgtcatatccgtcaccaggatttccacctgtgatcccggctgggccgcgcctgtcaggctgacgaaagtccggagcacgtcggttttcgttaaaatgcccgtcagcttatggtttaccgtaatcggcagacagccgatgccgtgctcataaaaggaagcggatatttcttctacaaagtcaagcggatgagcgcagatgacattccgcttcataatggtctccactttgtttgtcagaaatgcgccgcgttccttttgttcaaagctgccggggccggcctgtttaatgtctctgtctgtgacaataccgatgacgtgcagctcgtcgtcgatgacagggagatggcggatatgatatatcttcattttacggacggctgtttcaatggagtcgtgttttgagacggtgatgacgtcccgtttcatgatttgttctgcaatcatctttttatcccctttgtatgtcagtcaatacataaatcgctgataaaaacgaagcctgtcgaactgttcaattgactcctgactgacgtgcctgccgatgcgggccatcagacaattggccggatgagagctgatttccggttcatccgttgcgaaccagacaagacccccggcattcatcatcttttccatgatctttctgtattcccacacatcttttttcattccttttaaatcccaatgccagtaatattccgtcgtcatgatgatgtaccgttccatctgttcatccatcatgctgactgtcagcaaagtttttccgacagaacagcccctgtagccgggagcgacctcgatcgccccgagttcaaggaggtcttccatatttccgtcagaccaccgttcaagcggatcaggatataaatacgtcacatagccgataatcgtctgtccgtccctggcaataatgatccgaccttcaggaagcccggcgatctcgattaacgctttgtgctgttcatgaggaaggcgaaaggctgtcaggccttcatgaaactcatactgtgctaggtcctctggaggaacgggcccttctactaaaagagggccggctgctgtctgaattgatgaagaatggtacgttttatgatgtttcactgattcaccgcctgtcggttcttaataaaaacacatctcttttaagcataacaaaatataaagcgttttcaatagtgttgtaatttatattttaaaaattgagaaaactgtgaacatctactataattagtctatagataagcaaagggggatgttgcatgaatttgaaagcgttgccggcggaaaaggggaattatcatctgcgaaattatgaggaaacgtaccgcagcttcgattggaaagaggtcgaagcggcattttcctggcatcagacggggaagctgaatgcggcgtacgaagcgattgaccgtcatgccgaatcatttcgaaaaaacaaagtagcgctatattacaaggacgcaaaccgggatgaaaaatacacatttaaagaaatgatggaggaatcgaaccgggcgggaaatgtactgagacggtatggaaacgtggaaaaaggggaccgcgtttttattttcatgccgcgttcgccggagctttactttatcatgctcggcgcaattaaaatcggtgcgatcgccggtcctttatttgaagcgtttatggaaggcgccgtcaaagaccgcctcttgaacagccaggcaaaggttgtcgtgacgacacctgaactggccgaacggattccggcggacagcctgcccgacctcgagcatattttcattgtcggcggcagcaaagaaacgggagataaaatcattcattatgataaagcggctgagggagaaagcacgagacttgatattgaatggatggacagaagagacggctacctgcttcactacacatcaggatctaccggaacgcctaaaggtgtgctccacgttcatgaagccatgattcagcaataccagaccggcaagtgggtgcttgatcttaaagaagacgatatttactggtgcactgcggacccgggctgggtgaccgggacggtgtacgggatatttgcgccgtggctgaacggagcggcgaatgtgatcgtcggcggcagattcagtccggaaaactggtacggcacgattgagaagctcggtgtcagcgtctggtacagcgctccgacggctttcagaatgcttatgggcgccggagatgaaatggcatccagatttgaccttacttcacttcgtcacgtcctgagtgtcggagaacctttgaaccccgaggtcatcaagtggggacataaagtattcggcaagcgcatccacgacacgtggtggatgacagaaacgggcggacagctcatttgcaattatccttgcatggagatcaagccgggttcaatggggaaaccgattccgggagtggaagcggcgatcgttgacaatcagggaaatgagcttccgccgtaccgaatgggaaatctcgccattaaaaagggctggccgtcgatgatggattccatttggaacaacaaagagaaatatgattcttatttcatgccgggcggctggtatgtttccggagattctgcttatatggatgaagatggttatttctggttccaaggcagagtcgatgatgtcatcatgacatccggcgagcgcgtcggcccgtttgaagtcgaaagcaaacttgttgaacatccggcgattgccgaagccggcgtcatcggaaagccggaccctgtccggggagaaattattaaagcgtttatcgcgctcagagaagggcatgagccatccgatcagctgaaggaggacattcgcctctttgtaaaacaggggcttgccgcgcatgccgcaccgcgggaaattgaattcaaagataaacttccgaaaacacggagcggaaaaatcatgagacgtgtgctaaaggcgtgggagctgaacctgccggcaggcgacctgtccacaatggaagattaaagacggcgttgacatcgtatcttatttatgttaaaaatgagtaagcttcatacgaaaaggttttgattgagacaagtagggtatctgattgttcaagagagctgatggccggtgaaaatcagcacataagatatgccgaatacactcatgaaccgcttttgcgaacaaagccattccaaggctttcagtagtgaaagaacggacacggtccgttatcaaaaagagtgataaaagcttttttatgcttttattagtagggtggtaccgcgattatatcgtcccttcgttttaaacgaaggggcgttttttattttcataaacaaaggagcagacaaaatgactaatttattagaggatttatcattccgcggcttaatccagcaaatgacggatgaagaaggactgaataaacagctgaacgaagaaaaaatccgtttatactcagggtttgacccgacggctgacagcctgcacatcggacaccttctgccgatattgacactgcgccgtttccagcttgcaggccaccatccgattgcgcttgtaggcggcgcgacgggactgatcggcgatccgagcggcaaaaaagcggaacgtacgttaaatactcaggatatcgttgtcgaatggtcgcaaaaaattaaaaatcagctttcccgatttttagatttcgaggccggagaaaaccccgctgtcatagcgaacaactttgattggatcggaaagctgagcattattgaatttctccgtgacgtcggaaagaacttcggaattaactacatgcttgcgaaagatactgtaagctcaagaattgaaaccggaatttcttacacggaattcagctacatgatcctgcaatcctacgattttctgaatctgtacagagaaaagaactgcaaactccaaatcggaggcagtgaccagtggggcaacatcacggccggtcttgaactgatcagaaaatcagaagaagaaggggcgaaagctttcggtcttaccattccgctcgtcacaaaagctgacggcacgaaattcggcaaaacggaaggcggcgccatttggcttgataaagaaaaaacatcgccgtacgaattctaccagttctggatcaatacagatgaccgtgacgtcgtcaaatacttaaaatactttactttcttatcaaaagaggaaattgaagcttatgctgaaaaaacggagacggctcctgagaaaagagaagcgcagaaacgtctcgctgaagaggtgactgttcttgtacacggccgcgaagcgcttgagcaggccgttcatatctcccaggcgctgttcagcggcaatattaaagagctttccgctcaagacgtcaaggtaggatttaaagatgtaccttcgtttgaaaaagaccgctctgaagaactgtctttagtagacgtgcttgtggaatctaaattgtcgccttcaaaacggcaggcccgcgaagacattcaaaacggagctgtttacattaacggcgagcgccagacggacatcgggcatcttctgactgcggaagaccgcattgaagatcaatttaccgtactgcgccgcggaaagaaaaaatacttcctgatcacgtactgaaaataaaaagcagtccggccgctcaatgcggcaggctgcttttttatgttttgtgaatactgcacggggaaatgagtacagtacatagtataagcaaaacagggaaggggtgctgcgccgtgaatttcatgtttaccatcgcaaaagaaagattgcagcgggatcattgggaacagcagcaaagcataaacgccgaagccaaagccgaggaatcagagacggaagaagaaaatccgacatcataaagggaaagcctccattctgcggaatggaggcttttgattgtcaccatatcagcctgacggcggccatcagcacgactcctgtgatgaccgtgatggataagctttttgtccgcatcgcgcaaagcaatgtcgggatgagaacgatcattgctttccaatcaaaggtcaaagcgctgtttgttttcacaatcatgctttccgttaccagagccgtcaaaatgcaaagcggaataaaggagagccattttaaagccaactcaggcatctgaatgttccggacaaatataaacggaacaatgcgcggcacaagtgtaacaatcatgcagccgagtataatccagatcatttgtgtgctgatgctcatttgtccgtcaccaccccgatcgttgccacaatcacggttgagacgatgaccgcgatgtgtgacgggacgaaatacgataacaagaccataaaaatgatcatatagagaattaaggagaggctgtgcttcagcttttccgaagcggacgattgcaattgcagcacaagcagcgccgcaaacatagcgggcaaagcaaagtccaggccgagcgcgtaaggatcagatatccattgtccgagaagcccgcccatcacgcaggaaataacccagcacatgtaagcggttatattgaggccgttcatccacttatcgtataacctgccgttctgagccgctttgttcaccgctactccgaaagattcgtcagtaagcaaagccccgaagccgatatttttcgccaaagagtatttcgtgaaatacggcgcgatggtcaggctcagcagaaggtgccgcagattgacgataaacgtcgttaaaataatggcggaaatcggactcccggaaacaaggagcgagcaaataataaattgggcggcgccggcatagacacacaaagataacaaacaaatttcaagaatgcttagatgagaggcaacgccaacgatgccgaaagcaaaaccgatgctcatatagcccagcagcgtaggcacacaatcccgcaccccctgtaaaaacgtatcgttcatttcccgggaaacggcggttttttgcacttctgtgttaatcattttttatactcctttcatagagattataatgataacgactaatgaaaaaatcaaagaaaatacggttcacatttatatgaaccgatttccggtgacgacatgaaataacgaatggttttgtttcatcaggccttcaactttctcagccccgacttctttcacaagctccgcgaacatcagatcgtgcctcatatattccatggccacgagaacgagagcgggatcttctgatttaatggcccaggcattcgtctgcggagaaaaattggcgattaagacttctttattatcgcgggcagctatcgttaatcttccgcccatccgtttctccgccacttcaggagacatattatgatttgtcgtatttccgagcttcacttccggagggccgaacacaatcgaaaagacgggcaattgttcggcggcgcgtttgttagcggcttcttgaataaagggaatctgctgttcccagacagacagccacaactcttcctcggctttttcaatcatatccttcatctcattgatgacatgatcattcgtgctgatgcggcggatgacattcatctcctgctcgctttccagtgccaataacttttcctcaaggtagccgaatgagctctcgaaatcgtgccggagccggtcgattaattcctttccggcaagcggagcatatgtaaccggatcagacggcacaatatggacagcgcctttatcaactaatttccccaatacttcatagatcattgagcgggggacgcctgaccttttgctgatttcatatccggtaacaggcgagtgtttcaacaagccgatatatgctttacattcatattgagaaaatccaaacttctgtaattctttcagaacatcctccataaacatcctccgtagtggttattcatgaaactactataatgtaagcggttatatcttgtcaatgggacttgagtgctgaaagaaagatgcgcctgttttgtcgctttccaacttagtttatggtgagttacatgtatggcttttgtgaaaaacgttgccgtagacccacacgaatgccgtttgatacgataaattcaagaagttaaaaagaggaggatcacggtggaaaacacctctaaaatcgcttttttatcggttataagcaattccctggtcgtcatgctcaaaatagtggtgggtataataaccggatctgtcgcgatactttctgaagccattcattcttttttagatttgatcgccgccttcattgcctttatctccgtcaggatttcaaaaaagccggctgatacagggcatccgtacggtcatggaaaagtcgagaatctgtcggggactatcgagacgattctgatttttgcggcagggatttggatgatatatgaatgcgttcaaaaactggtgaacccggcgccggttcatctgcccgtattgggaattgttgtgatgcttgcgggggctctcattaatttgatcgtttcgaagttcgtaaaaagagaagccgaaaaggttaattccgtggcaatgaaatcaaatgccctgcatttactgactgacgtgtacacatcattaggcgtagcggcaagtcttttggtcgttaccgtaacggagtggtacatacttgatcccattataggtatggtgctggcggtgtatatcatatatgaagcgtttaagttaatgaaagaagcattcccgccgctgattgatacccgtttgtcggaagaggaagaaaaaacaattttaaagattattgaaacatttcaacaggaatttattgaaattcacgattttcgtacaaggcgctccggcccgcaggagtatattgattttcacctggtcgtagcctctcacgtgacgattaaagacgtgcataacctgtgtgaccgcattgaaagagatattacgaatgaattcaaacaagcacaggtaatgattcaccccgagccggagagcgagaggaagaaataaatcgatcttaagtttgcttttgttcccggcaaaatgcctgcaaaaggcccgttcccacgggtctttttgttgtataaatgactatttctcgctcatatgagagataagcttatacacgtgaggggttcatttcatacgttatgttgtaaagaaaaagggaggtgaacagaattgaacgctatttctgttaaagaaattgaacatggagttgccgttgcggaaagagaaggtttaggggagtatttataccaagaaccggtttctaaaaaatgttcgcgccgttcccgcagcagaaaacggacacaccgttctcgcagcagaagacggacgcatcaccggacacaccgttcccgcagcagaagacggacgcatcaccggacacaccgttcccgcagcagaagacggacgcatcgccggacacaccgttcccgcagcagacggtctcatcaaaaacgtagccgcaaacgctgttttaaatgctgactgcagactctattacaagtaacggggatctgctataatggcaagagaactgcataaaagatccagtatcatcatctgcggacactgaactgacaacatggcgctgtttgttcgtgtccgttttttatgttaaaaaagatgccggagggtaaaaaggaagggatgacgccgaatgaagctgaatgaggatttttataactctgaaggaaagacagtctctttgccaaacatcagcagcaagcttttgcatatcacggacagcgggcatatcagcgttgacttcatcagcataagcaggctgcggaaggcttcaaaaatcgcgatcttaggtgacagcgtcgcccgggggctgcgtgcggaatacggctttggtgacattctgaaagaccggacaaacgctgaaataaccaatctgtctgtcagcggcgttaatatgagcaacaacggaagcgataacatttatcagcaggcgcttaaaacaaagggacatgatgtcatcattgtccagggaacagatgatgattggtgcaaccacattcccatcggcacagatgaaaaggatatcaccacattttacggaggcttctgccaagtgattcagcagctgcgaagcggaaataaaggcgcgagcatcattgtggtgaccccaacgagacaagcaaaaatgtcaaaaggaaaaatcgtccgccgtgatactgataaaaataaactgggcctgaagctggctgactatgtgaaagcccaaaaagaagcctgcacactcctctctgtaccatatgccgatctatttgatactgatctcatcgacccatataatcccgctttccgcagcatgtgcatgtcagaaggtcttcatccgaacgagaaagggcatcaaatcatatttcaggaaatctgccggaattattattactattatgggtaacacagcgctaacagattattttcggctttgcttttctaaaagctcaattattctttgagatgcgtgtttttgcgctctcaaaagcgagacgatattaccggtaaaaccgattaaaatgataagcagcaaaatgatcatccacatagcgaacctcccgtcgggttttaaaacattctctttttattttacttatgatggatgggccggagaatagtctaacggatggtgttttttgagagccggtgaaaagtccataaaaaaagcacagactaaacgggtctgtgctttttttctcttatttcagcaggttcaatgattcacgattaaaggcttccaaatcgtcaggtgttctgcttgttacgatgttatggctcacgacgacttcttcatctttataatgtgcgccggcattgattaagtctttgcggatgctgcggaatcccgtgatatcttttcctttaagaaggtcggtatcaatcagcagctgcgggccgtggcagatcgcgaaaacgggtttctgattttccacgaatgctttagtgaattcacccgggcggtcatctccgcgcagaagatccggtgaaaagcctccgggaatcaataacgcatcgaattccttggcgtctgcgtctgagatcgcttgatcgatctttactttctcaccgtgcttgcccgtcacttctttcccagcttccaaatctattgtcaccacactgtggcccgcttctttaaatgcttccgccgggcttgtatattcaatatcctcaaattgatctgtcatcagaactgcgatttttttgctcatacatcatgcctcctgtgaatttgtatatgacaagaatatcaggcagattcccgcctcacaacgtatttgcttatgaaaaaagacccctctgaaaaagaggagccaaaaggtacggaggtctgcttaaacttacgtgtttaacctgagataaggcaagaaatcgaaccaattactttttgcgtctttttttctgctttttacacccgcatttccccggatcgcccggatcaatgacttcgtgaattgtttcttccttataaacgtggcggggaacataacggatatgctctctgttaatgtgtttgatgggatggacgtaaaccacttctttgtcagtatacttgtcagtcacaatatacttagggtcacagtaatacactttcgattttttacccattcatctcacctcccgtactttattaaatgctgacaaggaggattttgcatcggacaagtacaccatggcaagtccacaatttttcagctgcaatttcgtttttctgatttttcctgaatccgcctcaaattggaacggctaaccctttttgagcggggaaatctataaaaaagaattcaaaaacgattcttttctcaggtcaatcgagatgtatacatctttagggggatttttagaatgctcgatgaaaaaacgattgaaatcattaaaagcacagtgccggtcttagaagagcatggtgaagaaatcacaggccgattttatgacctgctgtttcagcatcaccctgagctgctgaatatctttaatcagacgaatcaaaagaaaaaaacacagcgtacggccttgtcgaatgctgtgattgcagccgcagccaatattgaccggctggaaaacatcgttcccgtcgtcaaacaaatcagccataaacaccggagtatcggtgttaaacccgagcattacccaatcgttggaaagtacttgttaatcgcgataaaggatgtgctaaaagacggggctgctcctgaggtcattcaggcatgggaaaaagcatacggcgtcattgcagacgcttttatcggaattgagaaggacatgtatgaacaagcggaaacgcaaaaaggcggctggaaagactataaggcgtttaaaattgataaaaaggtaaaagaaagcaaggagataacgtcgttttatttaaaaccggaagacggacaagttctccccgagttcaaagcgggacagtatatcagtgtaaaagtatacattccggacacgggttatacgcatatccgccagtacagtttgtcggatgtatccggtaaggattattacaggatttccgtgaaaaaagacggaattgtttcttcatatctgcatgaccaattacacgaaaaggattcaattgagatcagcgctccggccggggatttcgtattagaccctgattccaaaaagaatctggttctcatcagtgccggtgtcggaattaccccgatgatcagcatgttaaagacggttgccaaaacccagccgcagcgaaacgttctctttatccatgcggcaaggagcggagagtatcatgcgttgcggcatgaagctgaagaagccgcggaacactcatccgttgacaccctctttatttacagcgagccgtccgaacaagaccgttcagaaaacattcgttttcgggaaggccggattgacaaacagctgttagaagaagtgatgacagataaagatgctgatttttacctgtgcggatcaccgtcattcattaaagaaatgaaaaagctgatttctgaattcaatacaccgccggaatccattcactatgaattatttgaaccgcagctgagtatggtgtgattgaagaaggaaggacgatgattttaatgtatgaagcatccggactgggtgctttttttattctcttgcaaggaagggttgctgaggaatcactctgtagaggaaaaccactttttgtctcaactcgcttaattatcgaatgaaataagtgccgcatgttaaaaacatatggcccgcgagtttattgctcacttatcctgctgctcggatttttggtgtgtgagaaaaaaacggtacggttgcataatccggaagagacgctgaccttttacttgtaaaagaagtttaaagacaggatgaacgcttatttgctagtgtacgagcggcaaaagcaaaaagaggaatcggtattttaaaattaaaaataacaactgatagaaatgaaagtttcaggatacaatgggatttatatattcgggttttgtgatagcagtatagggaggggaataatagagtgagtaacttttttgaggaatcggtacagggaggggttgtatctatgcttactgatattaaacaaaaggtttggggatgctcttttatctgagaatcgatttgagatgaagcggggatgccgaggggatcagagggcgaacgtcaggcagaattacgccaagtggaccgccgagaaaaatggctctggaaatgtgaatctattgttgattttcttgagtgagctactgaagaaatagttgacgagaaacaccggactgtctttgtagtagacggggtgaaatatcgtgaaatcgctctgcattctggcgtttcccgcgaaacggtcagacgcatcaaagagaagattttttgccaaatatgtaatttttattgttgaaacagataaaatccgcagtgtagactggaaggcaaaatatttctgcgtccccatcgattcaaatagggattacaataatgtgaagagttatttataaacagaaattgataaataatataagatcagctgacaaacttaatgaggatcaaactagtgctcacttatttataaattaaacatattataatgatatattaatcattaagggagatgagcagctgatgggttatgatcagcatagaagatgccctaaatgtaaacaaaaactaccgaaaccaaactgctgtaagtgctgtcccatctgttatacaaaagttattgtaggacaacgaggattacgaggggtgcgagggattccaggggttacaggaccagccggaccagtcggagccacgggaccagccggaccagccggagcgaccggggccacaggagctatcggtccagccggatccaccggagcaaccggggtaactggagcggcgggagtcacaggagcgaccggggtaactggagcggcgggagccaccggagcgaccggggtaactggagcggcgggagtcactggagtgaccggggccaccggagatatcggtccaaccggaccagccggagccacaggagtgaccggggccaccggagctatcggtccaaccggagtcacaggagcgaccggagccaccggagctatcggtccaaccggagtcacaggagcgaccggagctatcggtccaaccggagtcacaggagccacgggagcagccggagccacgggagcgaccggggtaactggagcggcgggagccacaggagtgaccggggccacaggagctatcggtccaaccggagtcacaggagccacgggagcagccggagccacgggagcagccggagccacgggagcgaccggggtaactggagcggcgggagtcacaggagcgaccggagctatcggtccaaccggagccacgggagcgaccggggtaactggagcgacgggagtcactggagtgaccggagccacaggagatatcggtccaaccggaccagccggagccaccggagccaccggagccacgggagcagccggagctaccggagcgaccggggtaactggagcgacgggagtcactggagtgaccggagctatcggtccaaccggagccacgggagcgaccggggtaactggagcgacgggagtcactggagtgaccggagccacaggagatatcggtccaaccggaccagccggagccaccggagccaccggagccacgggagcagccggagctaccggagccaccggagccactggagcgaccggggtaactggagcgacgggagtcactggagtgaccggagccacaggagctatcggtccaaccggagcaaccggagccacaggatctgggctatcagaatatgcttatgtgtacaatctaagtgcagaaacggtagctatagaggctccggtaatttttgactcaactggaatcactactgctggcattacacatgcccctggaacagctcaaattatagtaaccactccaggagattacgaggtcactttttcagtctcgggtgtagagcctaaccaattcactttatttgtaaatggagggccggtgacgaacacagtttacggttcaggagctggtactcaacagaacaatggtcaggccataattactctagcagcaggtgacattcttactcttgtaaatcatacttctgcagcagcagttactcttcaaactttagcagggggaacgcaaacaaacgtaaacgcttctattgttctcaaaaaattaaattagataagtggtttaaatctccatattaaacaagaaatgagaatgacttaaaaaagcttatagagcttaatatacagctttagaaggatgaagaaatttaaaatataagcaaactcatctaatttttttatataaggtattatggtaataggtaataaacaggcaggcactttcccgcaggggagggtgctttaaatttaaggacaaaagcctccaactgttaagcgagtcaacacagtaggaggcttttctcttatgggtggtacagcagcagtattctcttacaaatcaaatattcccagaaagttatggcagtattcgtctctcgagtaatgaaaaaagttttatgttctctgtaaactgcgtccggtaaatctcgggataaacgattggcggttaacgactgagtacgggggcagtttagaaagaatatgattggagggattacataaaataattagtcaagccttagaggaattaggaaagaatgtgaggtgtgcggctgaaagggtgccaaatctcaaccctgttattatccataaaaaagacatggcagcgcaactacaggaattcagttcggatttaggcttgtcagcagatctccatcattgcctagataaaaaggtaaagaacttattaacggcgtatatggctcacaaacggcatatgcaatccatgattcctgacggcatttagggttaaaacaaaagcaaagcgcgaatctctactaaacagttactttaggacttctcaaaaaggaactcctattaaagggagcagggttaattttcaaattgtttaaataaaagtaaaaatatagcatgatagaccagaaaacaaatgaaggaggatttgtatgaggttgttaaaaaactcaatctgtttacttgtcgcaactctattgtttgctattggattttcgccgcaaacgaaagcaacacaagagcactcgtttggattagcaaaaccagtaacctttgaagaaaaagaaactttaacagtagataagaatggagtggctaagagcaataatgatggccaggcttccatcattaaggaggcacgacaacttgccaaacaggatagccacaatgaaattacctataagaaccccttagctaaagaagaaaacaacattgttaatgtgccagtcgttgagaaaaaagaagagaaagcgcacactaaagcagctagcttagttacgatgtcctacacaacaatatatgaccccaacaaaaaatccacacaaccacaattaaaatagcaagcatagttggcgaaaagccgatagttatcgaagcaagaaacgatttatatgaaagtaacacttatagcggaaaatacggaagggtttttctccataacagagaatttttaggtaaaaatattaaagcaggtaaatcatactcaaagtcatattatcctaaacagacaaagttgatccaaagtggaattggagttcattcgatattcaccatgtgcttccgctaaagtatggaggaaaaaataactttaataatttgtatcctctccctcgtgatatgcaccaaaatctattaaatccttggtgggataaatattaataagtaagaggtggctcaatggcagtttttgttgaaaaaacgctccaaggtctaaaagaattaattgatgaaaaaggccgcttaaaaattttagggaatgaaggaactcttttagagacagaatgtactttctctaaaggtgcaacagatctggagattgagagttttgagaagaaaataaaagtctcacttcctgaagattataaaacctttttaaaattgcataacggagccagaatatttgatttgttgatttacggtgagaatgtgggtgggggattgcatattcttaatttagaagagattgaaaagtatatgcaaaatggttttttagagcctcagtttattcccgtcgcacatctgttagacggatgttatttgttaattcacaaaaccaaaatgtccacagatccaaactatttatggttccgcggatttattgagtatgaaccaattcaacttaattttgagatatttttagataggtatatcatgtctcaaggagcagatttttgggagtggaatatctatactgctgaaaattattataggactcaccagggtgatgaggattaacctttcctacagttgggttggttcatttttactattagacttcgatttgaacttttaaaaataggtttaatttaggagacgaaccgattaattggtgtatagaggatttataaaaagcgcagatactctgcgcttttttatttaagtattttccgaatcattcgcagcccgtttttggaagaaggataacggaaagcgaagtcgaagcggttcgtttgtttgacgacgctttttttgtgcgtaaacgtgttaaagctgtcaaatccgtgatagctcccgatgccgctttccccgacgccgccgaatggcaaatacggcgtcgcaacatgcattaacgtatcattgatgcagcctccgccaaacgacagattctctaaaacagtgcgctcagtttctttgtttgtggtgaagagatacagagcgagcggctttgggcgcgattggactttctcgatgacttcatcgatatcaccgtatgtaaacagcggaagaatcggcccgaaaatctcctcctgcatcactggagagtcatccttcacttgatctagaatcgtcggcgctattttgtggtgatcaggattaaattgtccgcctgtgagcgggacgccatcatttagaaagctgagcagccgctgatagtggcgttcactgacgattttgccgtactgcggattttgttcaggctgagggccgtaaaattcgctgatcgcacgcttcatttcttctgtgagcttcgttttgatatcttggtggacaaataaataatccggtgcgatgcaggtttgccctgcatttgtaaatttcccgaagacgatgcgtttggcggcaagctgtatatcagcatccttatggacaatgcagggacttttgccgccgagctccaaggtaacgggaattaattgtttggcggcggcctccatgacgatttttcccacggcaacgcttccagtgaagaaaatatagtcaaagggctgctgtaataacacagtgctgacgtcgggcccgccttccgccatagcgacatagtcactcggaaaaacgctgctgatgagtttggaaagaacagcggaaaccgccggggtatattctgacggtttaagaacgaccgtgttccccgctgcaatggctccaatcaacggagaaagcgccagctgcaagggataattccaaggcgcaatcaccaaaacggttccatatggctcagggataatgatgcttttcgagcctaggtgagtcagaggcgttttgactcgtttcggtttgatccattttcccagccgcttcatcacaaaactgatttcctccagtacaattccgatttctgtcgtgtacgactcctgttcggatttgtggagatcctgatagagagcggctgttatatcggcttcttgtgttttgatggcttgtttcagcttttgcagcatgttcagtctcgtttctagctgtctcgtatgccccgccgcaaaataggctttgtgcttgctgacgatagaggggatgctgttcatttcgtctctcctttttgtaaggtatggtgatttattatgtggaaagtttcttctgcttgtcaaatgggggtttctaatgtgcatgtagctgaaaagccagtaggcacataaaaaaagccccggacaggggcttttttaataaagagaggagcatctgtccattattctgacagcccaaaagaaaaaccccggaaacattgtcatcacaacatgtccggggtttaatccaatgctctttaaagagcgttttacttaacgggagtagaactcaacgataagcgcttcgttaatttccggagcaagctcagagcgctctggaagacgagtgaatgtaccttcaagcttttcagcgtcgaaagtaaggtactcaggaacgaagttgtttacttctacagattctttgatgatagaaaggtttcttgatttttcgcgaacaccgattgtttgaccaggttttacttggtaagacggaatgtcaacgcggcttccgtcaacaaggatgtgaccgtggttaactaattggcgagcttgacggcgagtgcgcgcaagaccgagcttgtacacaacgttatcaagacgtgcatctaaaagaatcatgaagttttcgccgtgtttaccagtcatttttgcagctttgtcaaacaatgtgcggaattgacgttcgtttacaccgtacatgtgacgaagtttttgcttttcttgcaattgcaaaccgtattctgatagttttttacgctgtcccggaccgtggggacctggtgcgtaagggcgtttttctaattctttacctgtaccgctaagagagattcctaaacggcgagacagtttccaagatggacctgtatagcgagccataatgtgactcctcctttggttttattttgtggaaaataaaaaccgtctgttcgatccgaccgtgcacattttgttttcatgtatcctcgctccagcagcagagagttacacgatacaccttacagctaaggaacaaaatgcaaacacagaagctgaacaaaaaggctgcaatatttcacacaaagaacattatatgatttttctccgccgccgtcaaccatttctccatgaagagtgccggtttatgatataatgtacaaaaatgagtagtacatgtttaggtgataaaaatgaaaaaacaaacaattgatgaagtgacggcctttcatcagaaaatgctttcttttttcttaacgaaatctgaatccgtctcattatccgactcgctgttatggctggcctcagctctagaatcctgctttacatctctttcattgaccctttcaccggcagaatcaacacgtttcaccataaaaacagaagatgaaccgcattatgctccgctgaaagagagtgacggccgttttattatcaggaatcagacctccggcagatccttttatctgtgctcggaaggcgggctgccgatcccggaatcattgcctgagatcgttactcagtttattaatcaatctgtgagacaaagcgggctgtttgacaaaacgaagcatcagcggaaaattcacagaatgacagaaatgttccattcgcttttggaccaaaatgaggttttggaaaaactgcaggcaagtttgagtacggctttccggtctttccgtttttcactgtttatcacgcaggatcaggatacggacagacagcttcccgcaaaagaattacatatggacggaaaagatgccgatccgtctgccctgaaggtttatttatcggggagactgctcagaaaaggcaggtcatctgcttatctgccgatcaaaggccagcaggggacttacggggttctgaagacggaggggctgcaggatgccgttctttcgtgcagtactctcagtgaaatgctgctgcttgcgggcgcagcgggaaaagcatttgaaaatgcgcagctctatgagcaatcgaaaaaaagcattgcgaatctggagctcattaatgaaacatcgcgccagctgaatcagcgcctcagactcactgatacgatgcgggagctcgccgccattatgacccaatcgtttcatgcggaagaagtggctttttttcatattgatcattttgagacgcaaaatctgcttccgggacataccgctttttttaagacagaacgtgcgaacccctatatcagcattgtgaaagaaaagctgttcgagggagaaaagggcgtgtttatcggcagcggaaagactgtattcggcgaaaacggtttcggctcgctgatggcggtgccgatgatcgaaaatgacaccgtcttcgggttcgcgattttattgaaaaaggatttgtatgcttttacgtttgaaatgtataaactttttcaagcgctcattcaccatgcgacattggcggttacgaactccatgctgcgcgacaggcttgagcatcttgttcagacagaccagctgacggagctgtattcaagaacctatttggatgagaaaattcaatacagcatgaaaattcataaacggggtgtattcatcctcgttgatatcgataatttcaaaaatattaatgatacatacggtcatcaaacgggagattcgatcctgattcaggtggcctccgttatgaagaaccatattcgtgagcatgatgtcgctgcgaggtgggggggcgaggagctggctgtctatctgccgaatatcaacgtgtcatccggagaacgcatcgctaaaaggctggttagcgccatccgggaaaataccgagccgcgcgtgacgatttcctgcggcgtttcctgctggtcaaagaccggcccgatgccgttgaaattgctcgttcagcaagcggatgaggcgctttatatcgccaaacggaacggcaaaaaccggctgatcatccatcaaaacagcacgacgacataaaaaaggagccggcctgccggccgggctcctttttttatcctaatcgtttttcaagcgtttcaacaaactttgctaaataggtttcgtccgtttcatcaaaacggtttttcacggggctgtcaatgtccagcacaccgatcacttcaccgtttacgcggatcgggagaacgatttctgactgggaagccgcgtcacaggcgatatgtcccgggaacgcattcacatcggcaatccgctgcacgtcgccattagagtaggcagtgccgcatacgcctctgccgaacggaatgcgcacacaggcaggaagtccttgaaacggtccgagcacgagctcgccctctttagcgaagtaaaaccccgcccagttgacttcatgtaatgaatggtataaaagcgctgacgcattcgcgtaatttgcgatcgcatccgtttcatcttctgtcatggcttcgagctgtttaagcagaagctgataacttttttctttatctccggattgtttttcgacatgaaacatggaaaaccctcactttttctataatatcaaacaaagttccggccgttctgccggcatttgtcgagaagttcttacaggaacggcgcctttctgcttgaattgttacacataaaggggtgagccgtatgaaagtaagcaccaaagacaaaattattaacgccgctgtccagctgtttaaccaaaaaggttattccggcacgtccgtccgtgaaatcgcaaagtcagctgatgtaaatgttgcgcacatctcctactattttaaagggaaaggcggattaatggaacatttagtttccgagttttacgaaggctatactgaagcgctggaaaaagccgccgtcagtatgaacggtgaagacgcgcaggaacgcatcctgcgggtgattttcgatattttatcctatcagcacgataaccgtcaattaacgcggtttgtataccgggaagtgacgattgattccgtgcttatcagggaaattatgtctacttacttaatgaaagaaaaatatattttccagctggtgattgaagaagggcagtcacgccacaggcggctgacgctgcccgtgccgcattttattctgcaattgaaatccctcttgatgatgccgtatctccagcctcaatatattacggaggtgctctatatgcagcctcatgagccgtacttttataaaaggtattttgaagaggtgaagatctggatcgaaagcgtgttccgacggcctgatgcagcgcttatgaagtaatgatgtttttgtacgtttcgtaggaactgccgacatcttccgcttgatgggcgtccgacccgaatatgagcgggatttttttttgcttcgccgtctcagccatccaatcctccatgtatacttccccggcaaatttctttctgagcccggatgtattcacatccagctccattccgtgttctttcacggcgtcaagacagcgggccgcaagctctcttatttgaggtgacatgctgtaagggaaaaggcgcgcgaattttttgacgagcgtgatatggccgacccgttttggcttaaaggggccgagcggtgttacaatggaagaatacacggtttcatagtattgttcatatacggcttcaacgcttccgaagcggtcggcaagctgctgaaaggcgtgctcgtcaaaatcgaggcatatataagacggaccggtcttcaaaaaatgaacggataaaatgccgtcatccagtgaggggccgtacgtgttcagaaacgccgcggtttcctcttcataccctatgataaaatcggtttctagcccagtcagaatgctgatttgtccatcgtattcctttttcagctgtgacagccgctccaaataaacctccatctgtctgagatccatcgcgctgtcctgaagcggtacgggatcttgaaatgacggaggaaggggggcgtgctctgtaaatgtgatcgagtcaaagcctctttccagggccttttcgacatattgtttcagcgcatccttcgagccgtgagggcaaaaaggggtgtggatatgagcgtctcgtttttccatttgtgtcactccattaaaaaattgcagaatcctgccgaaattatgcaaaaagtttttgatttctggtcaaaaaatgttggttacatggtatcataataacaatgaaaacgacagattttctcaatacatatattgaaatctttctgaatacataaaacaccctgacagattaagagaacaacaagggggctcattatggagttagtcatcggattattggttatactgctcgcgctctttgcggcgggctactttttcaggaaaaaaatttatacggaaattgaccggctggaatcatggaagattgaaattttaaaccgttcgatagtggaagaaatgtccaagatcaaacatctgaaaatgaccggagagacggaagagttctttgaaagatggcgcgaggagtgggatgaaattgtcacagcccatctgccgaaagtagaagagctcctttatgatgccgaagagaacgccgacaaataccggtttaaaaaagcgaatcaggtgcttgtccacatcgacgacctcctcactgcagccgaatcaaatatagaaggcatactgcgtgagatcagcgaccttgtgacgagcgaggaaaaaagccgcggagagattgaacaggtgcgtgagcggtattcaaaagcgcggaaaaaccttctggcgtacagccatctctacggagagctttataacagcctggagacggatctcgacgaaatctggagcgggataaaagagttcgaagaagagacggaaagcggcaattacatcaaagcgagaaaagtgctgcttgaacaggaccgcagactggatcagcttcagacatacatagatgacgttccgaaactgcttgcggactgtaaacagaccgtgccgaaccaaattgccaagctgaaagacggctaccgggaaatgacagaaaaaggctacaaactggagcatattcaaatcgaaaaagagctggatacactcacaaatcaagtgaaacgggccgaaaacgcgcttttagaagaattggatgtcgacgaagcgtccgccatccttcagctgattgatgaaaccattcaatcgatgtatgaacagctggaaggcgaagtggaagccggacagtccgtattaagcaaaatgcctgagctgatcatcgcgtatgagaagcttgaggaagaaaaagaccgcacaaaaaccgaaacggagctcgtcaaggaaagctatcagctgacggcgggagaaatcagcaggcagcatgccttcgaaaaacagctggaaacgatcggccggctccttgagcaggcgagagaaaagcttgacggcgagcatgtcgcttactcgctgctgattgaagaagtcgaggccatcgaaaagcagatggaagaggctcagaaagaacatgccgaataccgtgaaaatctgcaggcgctcagaaaagaagaactgctggcgcgggaaacgctgatgcatcttcggaaaaccatttctgacacggcccgaatgctgcaaaaaagcaacgtgccgggaattcctgaacaagtcaaggacaagctcgagacggcaaatcatcatatagaagaaaccgtcagccaattggaagagctgccgctgaacatggaggaagccgccaaacatctggctgaagccgaaaaggtggttgaggaagtcagcgaagaggcggaagatcttgtgattcaggtgaagctgattgagcgaatcatccaatacggcaaccgcttccgaagccagaatcatattttatccgaacagctgaaagaagcggaacggctgttttatgcttacagctataatgaagcttatgagatggcggcagatgctgttgaaaaagcagctcccggcgccgtgaaaaaaattaaagctgatcaatctgcttcatagacgcataagcaaaaactgcaccctgatggaaatcagaggtgcagttttttagtttctcacggaatataaaaagcgcctgcggctgatatacatcaaaccgcaggcgctgaatgttacgattttgctttatttaattcgatgggcgggctggtaaaaaacgtgataatgcagccgatgatcgctccggcaatgcccggaagcacccagccgattcccatgctgtaaagcggaagatttgcgtttaagaatgaatctaatgatccgagcggaatgcctgctgccttcaaaccgtccaagatactgaacagccctgttccgatcaggcaggcgatatagacttcgcgtctttccttaaagattttatcaataaaggaaaggacgataatgacaatcgccagcgggtaaatggctgataaaataggaactgaaaatgcaataatctcagcaagtccgaaatttgaaatcgccagactgaacagcgtgacaatcgtaaccaccattttgtatgataaagcgggaatcaattttgaaaaatattcgccgcaagatgtgacaagcccgatgcttgtcgttaaacacgcaacggtgatggcggcgccgagaacgatgtttcccagtgaaccgaacaggtaatcagatgaagctgataaaatctttgcgccttcgccgagcggccccacagcgtccgtgcttgtcgctcccaaataggccaaagataaataaatgaatgtcaaacctgccgctgcaatcagacccgctttaatacaagcggcggcgagcgctttacgctgggtgacgcccctgcttttaacagcgttgacgacaacgacgccgaagacaatcgaggcgagcgcgtccattgttttatagccttccaaaaatcctttgaacaccggcgttccggaatatgcctgatgtacggcgcccagtccgcccatcggagtgacaatggcttttacaacgatgattaaaataataccgaatttaataggagtcaaaatctttccgactctgtccacgattttggaaggattaagagctaaataatacgtaatagaaaaaaagatcaacgtgaaaacaaataaagataatctttccggaatgccgcttaaaaacggaactgcaccgatttcatatgaaacggttccggttctcggaatcgcgaaaagcggcccgattgataaataaagcacaacggtgaaaatagtcccgaataccggatgagctttatcggcaagcccttttgcgtctttgcccgttaatgcgatggcgataatacccaaaagcggcagacctacgccggtcagtaagaaaccgcccatcgctttccagacattatgccccgccgcttgcccgagctccggcggatatatcatatttcctgccccgaaaaaaagtgcgaaaagcatgaaaccgataataacggtatctttgacaggtagtgagtgtttcataaaaatcctcctaaatactatgttgaaatattctgtcaattaattgtcagataatataacaaaacgaacattacttattatatggcaatgtacagagaagtcaatactcgatttattgcgaatttatatttacttttgttatggtagcataaatatcatacgatgtaccgttttcattaaaggagtaaaaaaaatgatatatttagacaacagctcaacgaccgagccgtatgaagaggttttggaagtgtataaacagacgagcagccggtatttcggcaatccttcgtctctgcaccggttaggaactgagacggaacagctccttgaagcggccgctcagcaaataaaaaaaaccttgcgtttaaaaaattatgatattgtatttacatcaggcgcgactgaagcgaataacgctgcgttaaagggagcggcctgggcaaacatgagtaaaggaaggcatatcattgcttcggcgattgagcatccttctgtgacggagacacttgatcagctgacagagctgttcggctttgaagtcacatatcttccggccgatcaaaacggcttcgtttctttgaaagacgtcaaatcggctatcaggccggatacgataatcgtcagcgtcatgcatgtcaataacgaagtcggctccattcagcccgtaaaggaaatcggcgggtttttgaagcagcaccggaatattctgtttcatgttgatcatgtgcagggcattcataaagttccgctgtctatagaagaagcgggcattgacctttgtaccgtttcagggcataagtttcacggcttaaaagggacaggagcgcttatcgtgaaaaaaggaacgcggctcattccgcttatcacgggcggctcgcagcaaaaaggtgtccgcgccggaacggaacacacggcaggcgccgtttcccttgcgaaagcgatcaatctttccgcgcgtgacatgaacgagcggctttcttccgtggaggctgccaagaatgcgctcatggaaaggctgagcgggacggacggggtcgttatcaacacccccgctgaaaacagcgcgccgcatatcattaatttttccgttccgggcgtgaaggcggaagtgctgctgcacatgcttgaggaaaaagaaatatatgtctccacaaccgcggcatgttcggcaagagagcacaaaccgagccgtgttcttctgcaaatgaataaaggcgaacagattgcatcaagcagcatcagagtcagcctgaacttcagccatacggctgacatcacagagccgtttatggccgcgctggcgccggctgttcaaaaactaaaaaaaatgatgaggtagcatatgaattacgatcatattttaatccgttttggtgaaatatccacaaaaggaaaaaacagacgcagttttattgaaagattaaaacagaatatccgcctggtattaaaggattataaaaaagtaaaatacttttcaaaccgggaccggatgtcaattacacttaatggagaaaacccggaggaaatttgttccttattaaagaatatattcggcattcaaagctttagtctcgcaattaaatgcgaaagcaagctggaagacataaaaaaaacggctttagccgcgatagaaggcgaatataaaccggggaatacgtttaaggtcgagaccaaacgggcttacaaacagtttgaattagatacgaatgcgatgaacgctgaaatcggcggccatattttgaaaaacacggatggattaaccgtcgatgtgaaacatcccgatattccgcttcggattgaaatcagggaggaagcgacgttcctgaccattcgtaacgaaaaaggcgccggaggccttcctgtcggttccgcgggtaaagcgatgctgatgctttccggcggttttgacagtccggtcgccggtttttacgcgatgaaacggggattatcagttgaagccgtacatttcttcagtccgccgtatacgagcgaacgggcaaagcagaaagtcatggatctcgcgggatgcctcgcgaagttcggcggcagtatgacaattcatatcgtgccgtttacaaagacgcaggaactcatccaaaaacaaatcccggagaactatacgatgacggcgacgcggcgtcttatgctgcaaatcgcggacagaatcagagaagaacggaaagcgctcgcgatcattacgggagaaagcctcgggcaggtagcgagccagacgcttgaaagcatgtatgcgatcaatgcggtgacggcaacgccgattttacgccctttaatcggaatggacaaaacagaaatcatcgagaaatcaaaagaaatcggcacttatgaaacaagcattcagccgtttgaggactgctgcaccatctttacgccgccaagtccgaaaacacgcccgaaaaaagaaaaaatcgagcacttcgaaagcttcgttgattttgaaccgctgattgcagaggccgctgccggcatcgaaaccatcactgtttactcggagcaggaagctcacgataagtttgccggcctgttttaaaactgtatacaattaccaaagtttttttgaatgaagacatgtgttttatcacattctatactcacaaggaggtgatacacatgtcacaacaatcaaacagcggaaacagcaaccagcttttagtgccaggcgctgctcaagctatcgaccaaatgaagtatgaaatcgcttctgaattcggtgtaaaccttggaccggaaacaacttctcgcgccaacggttctgtcggtggagaaatcacaaaacgtcttgtctcttttgctcagcaaagcatgggcggaagcagccagcagcagttttaatcacaacttcacataatggctaagagagcggggaattccccgctcttttttcatgagtatagatagaaggcgggaagcaatttatgcatatttttattgtaatggcctatgtttatgtataatggggaaagaaagtgaggagttgttcgtgttaaaacgagaagatttaatcgccccaaagaactataaccttgtaaatgaaatcgaaaagttcagccgttccaaagagaagaacgcgcttatttgggaagatcaaacaggcggtaagaaagtctggacgtatgaaaaattgatggaagaaacgaataaaatcggagcccgcctgaaaggtctcggatttgaaaaaggcgataagctgattgtcatggttccgagagtgcttgaagcgtatgccgtttatttagcgatcttaaaagcggggatggtcgtcattccttgctcggaaatgctgcgcgccaaagaccttgaataccggatcaaacacgccgaagtgaaaggcgctatcgtttatccttcatttataaacgcgtttgacgaggtgaataccgagcagctggtgacattgtcaatcggtgaaaataatgtcggctggaaaaacctcctaacgattgaagcggacggagacagttttcaaacagctgatacaacaagagaagacatggcgtttttgtcctatacttcaggcacgaccggccagcctaaaggcgttgtacatacacacggctgggcctttgcccatttaaaaacatcagccggtgcatggctggatatttctgaagacgatacagtgtgggccaccgcggcgcccggctggcagaaatgggtgtggagcccgctgctcgcaattctgggaagcggcgcgacaggagtcatttatcacggcagattcaacgccaagacgtatttagagctgctggagcgccatcaagtaaatgtcttctgctgtaccccgacggaataccgcctgatggcaaaagtggaggagttggacaaatatgatctttctgcccttcacagcgcagtttctgcgggtgagccattaaaccgggaagtcattgacgtattccggaagcatttcggcattaaagtgagggacggatacggccaaacggagagcaccctgttagtcggcgtcctgaaggacatggatattaagccgggaagcatgggcaaaccgacccctggaaatcaagtggagattataaacgataaaggcgaaatatgcgaaactggcgaaacgggcgatatcgccgtgcatttgagcacaccggccttattcaaggaatattataaagatcccgaaagaacgaaaaagcagattcgcggagattattttcttacaggagaccgagcgaaaaaagacgaagacggctacttttggtttgagagccgcaatgatgacattatcgtcagctccggatatacaatcgggccttttgaagtagaggacgcgctcgtgaagcatccggaagtgaaagaatgtgccgtcgtggcgagcccggatgaaatcagaggttcaatcgtaaaagcttatgtcgttttacaagacgatgaaaagcgcagtgacgaacttgtcaaagaactgcaaaaccacgtaaaaacgattacggcgccttacaaatatccgagagaaattgagtttgtcgaaagcctgccgaaaacggcgtccgcaaaaatcagacgtgtggagctgagacagcgtgaagaacggctgaaggctgataaaaaagcataatacaggataaagggtgagcggggatgaaagcgatttggcacggcggcaccatctatacaatgctggacaagaatcatgtcactgaagccgtttataccgaagaaggcgtcgtcaggcagacgggcagcttccgggagctccaaggaacatacggtgcgcctgatacggaggaaatcgatttacatggagctgtgatgttcccggggtttacggacagtcatatgcatttaatcggacacggggaaaaacagcttcgcctcgatttgtcgcagctgacgtcaaaagaagcgatactgcgggccgcaaaagaagcagagtgtgaattggaagatggcgaatggctgatcggcgaaggctgggatgaaaatctgtttgagcggccggtttacgtcacgaagcatgaccttgacccgctctttcccgaccgccccgtcctgctgaagcgggtatgccggcacgccgccgcggttaattcagccgcattgcgcgcggcgggaattacaaccgaaacacctgatccaaacggcgggattatcgtccgggacggcaccggtccgacaggcctcctgctggataaagcccaagagcttgtgacacaggccctgccgcccgtctcacttcactatgtcaaacgcgcgcttcaaacggcgattacggactgctggtcaaaaggcctgaccggcgggcattcagaagatctggcatactacggagacgcgtccgttcccgttgccgcgtacgagtcattaaccggcagcggcctttatccttttcgcgcccatctgctcgtacatcacgaagccgtcgacagctggagcgctctggataaatcgaccggaccttatctggaatacggagcgatgaaaatttttgctgacggcgcgctcggaggcagaaccgctctattgaaaaaggcttaccatgatgatccgtctgtttccggcgttcaggtgcatgatgacgaaacccttgccgctcttgtttataaagcgagagagaaagggatggagatcgccgtgcacgcgattggcgaccttgcatttgaaaaggtgctggatgttatcgaaagatacccggcaaagcccggacagcttgaccggctcattcatgcgcaagtattagatgacggattgattgaaagagccgcccggctgccgatcggacttgatcttcagccgcattttgtggccagtgattttccgtgggtgattgacaggctcggagaagagcggatgaaaacggctttcgcctggaaaacactgctgtcaaaagggctgctgtgcgccggaggttcagatgccccgattgagccggccgatccgcttctgggcattcaatcggctgtgctccgtacgagcaagcagcacccggaaggtccggcctattatgaaaaagagtgtctgaccgtgtacgaagccattcagctttacacggagggaagcgcggccatcatccataaagaacatagccgcggacggatcgcccccggctatgatgccgactttaccgtactcagcggtgatccgttcaggacggacccgaaaaagcttcatgaattggaagcggtcaaaaccgtcgtcggcggccgtatcgtatatgaaaaagaggacaggcagtgatgcccgtcctctttttttatgataaaaatgatcgttttactttttcccagaaagagttgtctttcagtttcaccgttttgatttttttatcggatagtctaatctcaacctttttgacattccgcgtgctgagcgcttcattatcaagcccgataatcggatgctcattgccgtcttgcaccacctgcagtgtcagcttccggtctgagcttaaaataaacgaagatccgagtgtacggtatgtgttgttgttcaacgatgccagttcggatacctgcatgcaggaaatcaaaggatcaacaacggcgcctgaaacagatttattgtaggcggtgctgcccgtcggggtggaaatgatcatcccgtctcctctgaacgtctcaaaatgaagatcatcaattaacacatccatcacaaacgttttaataatgcttgaacggatggaaacctcgtttaaacagtgaaaatgattgctgccgtccaccgttacgtgaatgagcgggtattttctgacctcaagctgttccgcggtcatgctggccgccattttttcaggctcatcgctgtgaaaatcacagtacaaatgggctttcccttttttagcgatgccgacatacaggcagtcatcacggaatccggtttttctgacggcttgcagaaatgagccgtcgctgccgatgctggcgataattccggcatcctccggttgagccgcaactgtaaaaccgtgcgattcagcaagctgcttcaaagagctgacttgttcttttgtttcgttgttttgtttgtgaaaaaaataaacattgcggcgaagatcggtcatatccccattcccctttgctgtcatatttacgtttttctcccagcaggtattgtgttaaaatacctgtggcaatagtgtaacatgtttcctgtttatccgttaagggaaagcgcttcatgaaaaaaatgaatctttttttacgggggaacgtacgaatattgacagaaaaggaggagaacaaatgaatgcaaaaagatggattgcgctcgtcatcgcgctcggcattttcggcgtatcagtcattgcaagtgtgaccgtcggggtgctgaagaatatcggagatacagggtctgactttgcatcactgacagatgacacagaggaagtgacgctggataagggcagccccggcagtaaaatcgccgtgcttgaagtggacggcacgattgaggataacggcgggtccgctggcctgctcagctcaggcggatatgatcacagatcatttttaaaacaggttgagcgtgcgaaagaagacaaaagcgtcaaaggaattgtgctgaaaatcaattcccctggcggaggcgtgtacgaaagcgcggaaatacataaaaaactggaagaactaaagaaagaaacgaagaaaccgatttatgtatccatgggttccatggcggcatcgggaggctactatatttcaacggccgccgataaaatctatgcttcaccggaaacgctcacgggttcactgggcgtcatcatggaaagcgtcaattattccaagctcgccgatgaactcggcatcaagtttgaaaccattaaaagcggcgcgcataaagacatcatgtccccgacccgcgacatgacgaaggaagaaagaaagatcatgcagacaatggtcaacgattcttatgaaggatttgtcaatgtcatttcaaaaggccggcacatgtcaaaagcggatgtgaaaaaaattgccgacggccgtgtttacgacggcagacaagcgaaaaaaatcggcctcgttgatgagctcggtttttacgatgacacgatcagcgcgatgaaaaaggaccataaaaatatgaaaaacgcttcagtcatcacatacgaggaaggattcggattaggctcgctcttttccatgagcgcagcgaaaatgtttaaaagcgaaattgattttctgaatatgaaagaactcatttcgcaatccggttcgccgcggatgatgtatctctatgcaaagtaggggggaagaaagaatggacgcgacttacgaaggctttcacggcaaagaagaggaagccgaacaacagagggcgcccgagcaggcatatgcgggcttttggatcaggttttgggcgtttcttcttgattggctggtggtctggggacttaaccatctcatcgtttcaccggttttcacgctgatgaagctcccggcaacaagcggaatgtttacaatctcagcttattccgtcacaaccctgatcgtctacctcgcctattttgtgttcatgacgaaatggtttcatcagacactcggcaagatggtcttcgggttaaaggtcacttctttgacgcccggaaagccgctgacttggagcaccgtcattttcagagaagcggtggggcgttatatcgataaaatctggattctctatatcgtcattgcgtttacgcccaaaaagcagggcattcatgatctgatcgccgacacaacggtgattcacgaagcgctgtaccgcaaataaaagcagtaaacccggaataaacgtccgggtttattttttttggttttggcgataatgctgctaaggaagtgaagcttatgggatatgccgcagcagctgttattctcattctcattttggcctggctgctcatgaggatgaaaatccacctgactttcgaatatcttcacgataaagataacgacaaactgacgtttaaaatctcggccttatacgggctgatccgtattaaaaaaacgctgcccgtcattaaagtaaacagcgaagacgcgtcaattgatgtcaaacaggacacaaaatcagaaatgaaaggtcagaaaaaagagaagaaaaaaatcacatatgaagatgtcaaacagagcattcacagaatagaaatgattctgcaccaagtctttcagatgcgccaaatcgccgcttcatttcttgcgggagtccgtgttacgaagttcgaatgggtgacggttatcggaataaaggacgccgccgttacgggaatcgccgccggcggattgtgggccgtaaagggaggacttacggcgatgctgtatgatcatctgcgtttcatacatgaaccggtgtgcgaagtcattccgtcttttcaagtgcctgcatccaagacgcatttgcagtgtatattcttttttcgttttggacatcttataggtgcagctttcaaattgctcaaatacgggcggaacggactttctatcatacgaaagaaacagccggttccggttgcttcaaagaatgattcatcagtttaaggaggagcgcatatggcagaccatcccattcaaggtttaatgaaaaccgctatggaaaatttaaaagaaatgattgacgtgaatacaatcatcggcgatcctgttgaaacgcctgacggcagcgtaatcttaacggtttcaaaggtcggcttcggatttgcggcgggcggaagcgagtttggaggaaagccggctgaaaaaagaaccgatgatgatgaaagaaaagagcagaagctcccgttcggcggcggaagcggcggcggagtatccattacgccgattgcgtttctgattgtcggaacaaacggcgtgcgtatgcttcatttagacgaaaacacccatctgattgataaactgttagactccgcgcctcaaacgattgaacgcatccagcatatgtttaaaaagaatgaaaaaggccggaaccaaaaaagaacggatatcgatttataacagaaaagttaactgccgcccgcagttagctttttttacgatgcggcataacctttgcagtttgcataaaactcgactatgatagagctatacatagataaagggaggaatcagaatggctgaaattacatttaaaggcggagccgtgacgctgatcggacaagaagtgaaaccgggggaccaagctcctgacttcacggttttgacaaacggattagaagagaagacattagcagatatgaaagggaaagtaacgatcatatccgttattccttccattgacacaggcgtatgtgacgcgcagacacgccgcttcaacgaagaagccgcaaaactcggtgatgtgaacgtttatacaatcagcgccgaccttccgtttgcacaagcgcgctggtgcggagcgaacggaattgataaagttgaaacattatcggatcataaagagatgtcatttggtgaagcattcggtgttcacatcaaagaacttcgtcttttagcgcgttccgtatttgtccttgatcaggacggaaaagtcgtttacgcggaatacgtaagtgaagcgacaaaccacccgaattatgaaaagcctatcgaagctgcaaaagcgttaatcaagtaaagagagaaaaagagctccgggtgctgccgcggagctcttttcatggcaaggaggaaacagcatgcaacacgaccatgtcggtcagatttatgaacttttagatgaagccgcccaagtgatagcagaaggccttcagatttcttatattgaggggcttgcggaagcgggagaaatgtattttcttgaaaaggccgaccagcttccgcttcaggaaaagcaaaccggcgagcttaaaagcctgctcgcgaaagcagacttcagaaaatgggagcatgaatggatccgcaaggcgttccagctcgccattttaaaagggctgaaagataagtcccatccgaacagacagatgacgcctgatacgatcggcattttcatcagttacctcgtgaataaatttacgggcggccgaaaaggcctgacattgctggaccccgcctgcggcaccggaaatcttctgctgaccgcggcaaaccagctttctgacaaagcggcaaaaagcttcggcattgaaatcgacgatgtccttctgaagatcgcttatgctcaggcgaatctgcaggaaaaagaaatggagctgttctgccaggacagtcttcagccgttatttatcgagccggccgatgcggtcatctgcgatttgccggtcggctactatccgaatgacgaaggcgctgaagcgtttgagctgaaagcggatgaaggccactcttttgctcaccacttatttattgagcagagcgtcaaacatacaaaaccgggcggatacttattttttatgattccgaaccatctgtttgacagcgcgcaaagcgataaactgaagcggttttttgcggaaaaagtgtatatcaacgcccttcttcagctgccggctactatgtttaaagacgaagcgcaggcaaagagcattttaatcttgcagaaaaaaggcgaagacgcaaagccgccgaaacaagcgcttttggcgaatcttccttcttttgcgaaccagcaggcgatgcgggagatgatggcaaaattggatcaatggattcaaaaagaaaaataatggcgaaaaagcagtgtgagatgcaaaatcccgcgctgcttttgctttttaaaatgaatgggaatcaggacgataacacaaattaaggaaagaaaataacattccgtaagaccgtgccgtccatttggcacaaatgaaatttatcagaaaatatcgacttcatattgtaagcggtaccaatgtggatgttgacttgaaatgctgagttgacaatgtttaaatggaaaagtcagatattttttagactgcaattatggtctgggaaaaaagaacgaacaaacgaagaagaattttgataggagcgtcatttatgtctaaaattattgcaattaacgcaggaagctcatctttaaaatttcagttattcgaaatgccttcagaaaaggtgctaacaaaaggtttagtagaacggatcggtatcgccgacagcgttttcacaatctctgttaacggcgaaaaaaatacagaagtgacagatattccggatcatgcggttgcggtgaagatgctgcttcacaagctgactgaattcggtattataaaggatctaaatgaaattgacggaatcggccaccgtgtggttcacggaggagaaaaattcagcgattctgttttgcttacggatgaaacaatccgtgagattgaagagatttcagaactagcgccgcttcacaacccggctaacatcgtcggcattaaagcctttaaagaagtgcttccgaatgtgcctgcggttgcagtgtttgatacggcgttccaccaaacgatgcctgaacaatcctacctgtacagcctaccgtacgaatactacgagaaatacggcattcgcaaatacggtttccacggtacatctcataaatacgtgacacagcgcgcagctgagcttctcggccgcccgcttgaagatttgcgtctgatttcctgccaccttggtaacggcgcaagtatcgcggccgtagaaggcggaaaatccattgatacgtcaatgggcttcacaccgcttgcgggtgttgcgatgggaacacgttcaggaaacatcgaccctgcattgattccgtacattatggaaaaaacggatcagacggcagatgaagtattaaatacgttaaataaaaagagcggactgcttggcgtatccggtttctccagcgaccttcgcgatatcgtagaagcttcaaaagaaggaaacgaaagagcggaaacggctcttgaagtgtttgcaagcagaatccataaatacatcggttcttacgctgcgagaatgagcggcgttgacgcgattattttcactgcgggtatcggtgaaaacagcgttgaagtcagagaacgcgtgcttcgcggcttagaattcatgggtgtatattgggatcctgcgctgaacaacgtgcgcggcgaggaagcgtttatcagctaccctcactctcctgtcaaagtcatgatcattccgactgacgaagaggtcatgatcgcacgcgacgttgtccgccttgcacagtaatgatcaaaaaaagcacatccttttagggtgtgcttttttattgaatgccccagaatcaaacgttacgatatgtttattacataaacgatgaggtgaagcaatgagtgtgcatgaacataaacaagaagccccgtcagccgtgcgctgcaaggtgattacagtcagcgacacgagaacgaaagaaaccgacaagagcgggcgcgtcatgatggacttcctcagggaagcgggatttgaaacggtcgcttatgacattgttaaagatgaaaaagatgaattgcagaaagccgttttatccggctgtatggatgaatatacagatgcggtgctgttaaacggagggacgggcattgccgaaagggatgtcacaattgaagcggtcacgccgctgttttcaaaagaactcccgggattcggcgagctgttccgcatgctgagctatacggaggacatcggttccgccgccattttgtccagagcggcagcgggtgtgatccaaaataccgcagtcttctgcacgcccggctcctcaggcgccgtaaagcttgcaatgagtaaactgattattcctgaactgccccatgtgctccgggaaatccgaaaagatttataaatgtataaaaaggctctgctccgctcaaaaaattgggtggggttttttttataaaaggcttgaaaaaacagaatttacttgttacagtgtatacatacaaaatgcatttttattaattaaaactaatttttatacaaaagggagcttttaacatggcagaacaaaaaaaggttgtattggcatactcaggaggtcttgatacttctgtagcgataaaatggctgcaagaacagggatacgatgttgttgcctgctgtttagacgtaggggaaggaaaggatttggcattcgttcagcaaaaagcgctggaagtaggcgccgtaaattcctatgtgattgatgcgaaggaagaattcgcccgggagtacgcgctcatttctatgcaggcccatacaatgtatgaaggcaagtatccgctcgtatctgcactatcccgtccgttaatcgcgaaaaaactcgttgaagtcgcggaaaaggaaaacgcggtggctgtagcgcacggctgcacgggaaaaggcaacgatcaggtgcgtttcgaagtatccattaaatcattaaatcctgatctggaggtcattgctccggtccgtgagtggcaatggtcgcgtgaagaagaaattgaatatgccgcaagccgcggcataccgattccgatcaatcttgacagcccgtattccatcgaccagaacctatggggacgcgccaatgaatgcggtatattagaagacccgtgggcggcgccgcctgaaggggcatatgacctgacagcatctcttgaaaacacgccggacgttccggaaatcatcgaaatcgcatttgaagccggtgttccggtttcaatcgacggcgtaacctacccgctcgctgatttaattctcaagctgaacgagactgccggaaaacacggcatcggccggattgaccatgtggaaaaccgcctggtcggcattaagtcccgtgaagtttatgagtgcccgggcgccatgactttgattacggctcacaaagagcttgaggatctgactttagtgaaagaagtggcccatttcaaaccggcaattgaacaaaaactgtctgaaatcatctataacggtttatggttctcgccgttaaaagacgcgctgcttgcattcttgaaagaaacccaaaaacacgtcaccggcgtcgtgcgcgtcaagctgtttaaaggccacgccattgtagaaggacgtaagtcggaatattcactctacgacgaaaaacttgcgacatatacaaaagacgatgcttttgaccatcacgcggcaatcggtttcattgagctttgggggctgccgacgaaagtaaacagcattgtgaaaaagaaggagcagattgaagcatgaagaagctttggggaggccgttttcaaaaaacaccggaaaagtgggtcgatgagttcggcgcatccatcacattcgaccaaaacttagtcaaagaggatattacagggtctctcgctcatgcggcaatgctgaaaaaatgcggcattctgacggaagaagaagaaggcgccatccgacaggggctgcagaccctcctgcaaaaagcagaggaaggaacgcttgaattctctgttgattatgaagatatccatttgaatattgaaaaaatgctgatcgaagaaatcggaccgctaggcggcaagctccataccggcagaagccggaatgaccaggtggcgaccgacatgcatttgtatttgaaagatcatgtctcacatatcatcgtgctgattgaacatttccaaaaagcgctgatcgaaaaagcggagtccaatgtcgagaccattctgccggggtacacccatttgcagcgggctcagccgatttctttcgcccaccatctgcttgcttatttttggatgcttgaacgggataaagagcgttttcgcgatgctatgaagcggattaacatatcgccgctcggatgcggggcgcttgccggaaccacgtttccgatagaccgtaactattcggcggagctgctcggttttgactccatttatgagaacagtcttgacggagtcagtgacagagattttattctcgagtttttaagcggcagcagcatgctgatgatgcacctttcgcgtttatcagaagaaatcattctatggtgctcgcaggaattcagattcattgaactggatgatacgtatgcgacgggaagcagcatgatgccgcagaagaaaaaccccgacatggcggagctgatccgcggtaaaaccggacgcgtatacggtgatatgatggggcttttcacgattatgaaagggctcccgctcgcttacaacaaagacctgcaggaagataaagaaggcatgtttgacacggtgaaaaccgttgaaggaagccttcagattttcacgggcatgattgaaacgatgaaagtaaacaaagacatcatgaaacaagcgacaaaacaagatttttcaaacgcgacggaacttgccgattatttagctaaaaaaggcatgccgttcagagaagcgcatgaagtggtcggcaagcttgtgtacagctgcattgaaaaaggaatctatttaagtgatatggcatttgaagaattccttcaagccagcagtctctttgaagaagacatctataccgtgctcgatccgcatcatgcggttgaaaaaagaatgagcgccggcggaacgggttttcagcaggtagaacaggcgctcgtaaaagcaaaagcctgcgccggcatttaatttgctgaaatttccttcatattttcccgtcatatcagacaccctacatctataaagatgggaggtagaaggaatgcgcaaagaacaagaccgttacatctatgatgaaaaagaaagtgaagaaacggccaggctcatctcagaggcatacgaaagcggttatgtcggcatggaggaagcctctgctccttcagaaaattaagctgtctgtaaagacggcttttttttcgtgcggacgaagtgcaaaaaagtgatattgccgtttgtttatagtaaagtagagggagaaacgtcttgattttattgaagcggcaacgttgcctggggagggtattcaatgtgcgacatgctctaatcactgccggtacaaagggattgggccgaaaagtgactgaaatgcttctggaaaaaggcttttctgtcacagtgaattacagacaagacgaagaagcggtcgcctgtctgaaggcggattatcccgggtgccatgacagattgcaattcgttaagggcgatgtaacccggaaagaagatctcaagcggatcgccgatgcagcccttcagcggtttggaaggattgacatactgattaacaatgccggaccgtacatatttgagcgcaaaaagcttgccgattactccgatgacgaatggtatgacatgcttgaagggaatttaagcgccgttttccatctgtttaaagcggttatcccggtcatgagacagcagcggttcggccggattattacatacggttttcaaggagcggaccatgcccccggctggcttcaccgttccgctttcggagcggctaaagtcgggttggcttcgttaacgaaaaccattgcgattgaagaagctgaatcaggcattacggccaatatggtctgcccgggtgatattgtaggagatatgaaagaagcgtctatagaggaagcaagacggaaaatcggcaaagaaaagacgccgatcggcaggtccggaaccggagaggacattgcgagaatcatcgcctttttatgtgaagatgattccgatcttgtaaccggaacgatcattgaagcaacaggcgggctgaatgtgattaacaggcatcaatccctgtaagttttttcgtttgtcaaaaagggaacttgataaatattaattttttatgaggtgaaaacgatgaaagtgacttatcacggacattctgtcattcaagtggaaacgaaaacccataacattatttttgatccgtttctgaccggaaacagtctgacaaatttgaaaccggaagaagtgaaagcggatgtcatcctgcttactcacggacacaatgaccatgtcggagatacagagcagatcgctaaacaaaacgatgcgctcgttattgcgccgaatgagctggccgtttatctcggctttaaaggtttaaaggtccacccgatgcatatcggaggggcgcgccaatttgatttcggtaaagtgaaactgacacaggcattccacggatcggcggtcactgatgaagaaaacaaaaccattacgtacacggggatgccggccgggattttattgacgattgacggcaaaacgattttccacgccggggacacggcgctgttctctgatatgaaactgatcggggaactgaatcacattgacctggcgtttctgccgatcggtgataacttcaccatgggccctgaagatgcgaaactcgcggctgaatggctgagagcgaaacaggtcgttcccgttcattacaatacatttcctgtcattgaacaggaccctgacgctttcgccgaaagtctgcccggaggcgtcggcaaagtcatggcggtcggcgagaccattgagcttgcctgacatatgtgtcaaagaccttctgaatcaagcattcagaaggtctttttgtgatgccgccttttttcgggcgtctcattgcgaatgaatccctcgtacccttataataaaagcagaagactgtccttagaggtgaaacgcttggcaacaaagcatgaacaaatcatatcatacatagattcgcttcctgtcggtgaaaaaatttcggtcagaagaattgcgaaagaaatgaaagtcagtgaaggaacggcttacagagccattaaggaagccgaaaacaaaggattcgtttccactattgaacgtgtggggaccatccggattgaacagaagaaaaaagaaaatattgaaaagctgacatacgccgaggtcgtcaatgtgatagacggccaggtgctcggcggaaaagccggtctgcataaaacgttgaataagtttgtgatcggcgcgatggagcttgacgcgatgatgcgttatacggcggcggggaacctgttaatcgtcgggaaccgaatcaacgcccaccgtcaggcgcttgaagcgggcgcggctgttttggtaacaggagggtttaataccgacgacagcattatcgagctggccgatatgcttgagcttccgattctctccacgagctacgatacctttacggtagccgcgatgatcaaccgggcgatctatgatcagctcataaaaaaagagattgtgctcgtggaagacattttgacgcccgcagatcggacagtgacgctgtcccctaaggataagctggagaaatggtacgaaaaaaactatgaaaccggacacggccgcttcccggttatcgatcagcagatgaaaatccacggaatcctcacatcgaaagatatcgcggggcatgaccggtcagttccgattgaaaaagtaatgaccaaaaaccctgtcacggtgatcgggaaaacatctgtcgcctcagcggctcaaatgatggtttgggaaggaattgaagtgcttccggtgacagacgggcatcacaaattgatcggaatgatcagccgccaggatgtcttaaaagcgcttcaaatggttcaaaagcagcctcaggtcggggaaaagctggatgatattgtttcaaggggatttaaagaagacgaagatgacaaaacgccggccgtttatcaatatgaagtcacgccgcaaatgaccaatcagctcggcacgatttcttacggggtgtttacgacgattttaacccaggccgccagccgatttttacgctcccgcaaacgcggcgagctggtcattgaaagcattacgattttcttcctgaagcccgtacagatggagtcggtcattgaagtgaaaccgcgcattttagaggcgggccggaaattcgggaaaatggaagtggaagtgtcaagccaaagcggcatcgtttcaaaagcgatgctcatggtgcagctgatggagagaagttaagggacgcacccgggtcccttggcattcattatgcgtggtccctctccgcttcctttgcatggatgggctcataatgcttataggctctatacccggcccatgcgctgcctgctccgattaaaatgaagacgccgccgatgaccagagtcaggacggagtgaaacagaatcatttggtttactccgtacaaaaacaccagcgcgcctaatgccatacttgatttagccgaaaaacattctttctccagcgcccgtttcgtctggattccttttactttgtaatacacgtaaaagcaggcagaaagcccgatgagaaaaacaaaaaccagcataaatgaaatcctccattatatgagtttgcaaaaccgtttataccgttgctgaaagattttccttttccatggataaagagtatgattaaatgaataaaaacgaaaaggagaaagcgatgaaatccgaactgatcagaaccatatcattatatgacaccattatcttacatagacatgtgaggcctgacccggacgcctacggttcacagtgcggccttacggaaatcctgcgggaaacgtatcccgaaaaaaatatttttgccgtcggacagcctgagccgtccttgtcttttttatattccctcgatgaggtggatgacgaaacctataaagatgctcttgtcatcgtgtgcgacaccgcaaaccaaggcagggtcgacgatcagcgctaccattccggcgcaaagctcatgaaaatagaccaccatccaaatgaagatccgtatggcgatctgttatgggtcgatacgaatgcaagctccgtaagcgaaatgatctatgagctgtacctggaaggaaaacagcacggctggaaactgaatacgaaagcagctgagttgatctacgcgggtatcgtcggtgatacggggcgcttcttattcccgaacaccacaaaaaagacattaaaatacgcgggagagctcattgagttcccattttcatcgtcagagctgttcaatcaattgtatgaaacaaaattaaatgtggtgaagcttaacggctttatttatcaaaatgtgtcactgtctgaaaacggcgtcgcttccgtgttcattaaaaaagacattttggagacatatggaaccaccgcttctgaagcgtcgcagcttgtcggaacactcggaaatatttcgggtatccgcgcttgggtgtttttcgtagaagaagacgatcaaatcagagtccggttccgttcaaaaggtccggtcatcaacggaattgcccggaaatacaatggcggcggacatccgcttgcggccggcgcatccatcttcagctgggatgaaaccgatcagattcttgctgatctggaagaggtatgtaacgaacacaagtagaggggagaccctctttcttagtgttcatctgtcacggggatgaaccagcagccgaaatcagtcaggtcttcgtagacgcggagattacagatttggagttctttttttatgagggaagcgagtgtgtctgtttctgcatatgcggaatagccttgtctgattcgggctgcatgatcttttgccaagcgtcgttcactaaaaacctccattttcccttcctcccttcagaatcattgaaaatgtctcatctacagtttataaaaaagcggagaaaaaagcgacagatctatggaaaatttttaaaaatgacataattacgtcgcaaaagaaatatgaatttcgacagacaatctcgtataaatcgtcagttcctttacttcagctttaaattccttctcatttatggtgtatattttgttttcgatcgtccgttttaaaagctcctttgttttatacacgctttcaatatcttttgtgatgacttcagaaatgttatctttcacttgttcctcaaatttcatcttgtcaggctgggcgattctgtatttttccccattgatcagcttcacatcaacactttggatgagaagtctttgcttattatcctcatttaatttatgaagatccttctgatagatggagatttggttttttaaatcccgcgcgtgctcacgctgcttttcaattaacgtcacttgttcttcctgaaacgttccgtatgtaaacagaaagaacagccagctgacgatggctccgcacatcattcccgcgaaaaaacgctgccatcccggttttttataatactcgggaattctcatgatgacatattctcctgggtcagccatgaaataatcagccagccggtctgcgcgccgcccattgctgaaataattaaaagaagctgtttgaaaatgtcgcgcgtgttgccttcaaacagcccccgctcgaaactgtataccgcgtcaaatgttcccccgatcgccgcgacaagcgcccagatcttcagcctgttcgccaattttgtgatcgccgtcagcggaggctcgcctgataaataagctccgaggccgccgatcagcgcgccgccgagcaacacaccgagggcgataaaataactgctgatgaaattcgccataaatccggcttcctgatccatatatacaccacctcacttttctatcatattgagcgaaacggacaagtatgatgatgagtcaaaaaagaacatttgtttcttaagaaaacccgtcttataatgtagaaaggcaaaatgaacgtatgggaaaggagtggcggcattgtcttttgttcacctgcaagtacatagcggctacagtctgttaaacagcgccgcttctgtaaaagagcttgttacacaagcgaaggaactcggatattcatcattggcgctgacggacgaaaatgtgatgtacggcgccattgagttttataaagcatgcaaatcaaacggaattaagccgattatcggtctgacggcttctatatacacggacgatacggagcttgaagcacatccgctcattcttttagcagagacaaacaccggatatcagaacctggtgaaaatctcaagtgcgctgcaatccatggcaaagggcggcatgaagcgaaaatggatgaagagctatcatgaggggctgatcgccattacgcccggtgaaaacggctacattgaaagcctgcttcaagccgggaagtttgaagaagcagtccgggctgccgaaggattccgggagctgttcggagacggccgtttttatttagggtaccagccgtttaaaggacatgagacgttatcagaagagattctccgcctgtcagccgagacggaaatcgctgtctgcgctgcgggggatgtccgttatatcaagaaagaagatcaagatgcgtaccgctgtctgtgcgctattaaagccggagagaagtgggaggatcagagcgggaatctgccggacttatacttgagggcgcctgaagaaatggcagagctttacacgcggcatccggaagcgattgaagcagccgcgcgtatcgcccggcaatgccgggtcgatgtcagcctcggacagacacagcttccgtcttttccggcgccggacggcaaatcagccgatgactatttggcggagatctgtcatgaggggctgcgcctccgtttcggtactcctgatgagcgcgctgtccgccggcttgaatacgagctggacgtcatcaggcgcatgaaattcagtgattattttctcatcgtatgggactttatgaagtacgcgcatgaaaagggcattgtgacaggcccgggaagggggtccgcggcaggatcgcttgtcgcttactcccttttcattaccgacgtggatccgcttaaacattctctgctgtttgagagatttcttaatcccgagcggatcagcatgccggatattgatatcgatttccctgacacgagaagggatgaggtcattcagtatgtacaaaataagtacggggccatgcacgtcgcccagattatcaccttcgggacattggccgcaaaggcggcgttaagggataccgggagagtgttcggaatcagcccgaaagaagccgaccagcttgcccgcctgattccgtcaaaaccgggaatgacgcttgatgaagcgaggcggcagtccgctcagctgaagaggaggctgtccgaatccgccgttcttcataaagtgtttcagatcgcaaggaaaattgaaggtcttccgcggcacacgtcaacacacgcggcgggggtcgttctcagtaaagagccgctttcggaagttgtccctcttcaagaagggcatgacggcgtgtatttaacgcagtatgcgatggatcacttggaagatctcggtcttttaaaaatggactttttaggtttgcgcaaccttacgcttattgaatccattaaaacgatgattgaaaaagagacgaatacgaaaattgatttttccgagatttcttatcaggatgaaaaaacgttctcactattgtcaaacggtgatacgacgggtattttccagctggaatcatcaggaatgagaaacgtgctgaagcgcctgaagccgtcaagactggaagacattgtcgcggttaacgcgctttacaggccgggaccgatggaaaatattccgttatttatcgaccggaagcacgggcgggcgcgtgtggaagtgccgcacgaggacgtacgaaatattctcagtgacacttacggcgtcatcgtctatcaagagcagataatgatgatcgcctcgcgcatggcagggttttcattaggtgaagcggatctgctcagacgggctgtcagcaaaaagcaaaaggacattctggacagagagcgaagccattttgttgaagggtgcttaaaaaaggagtattctgtagtcactgcaaacgaggtctacgatctgattgtaaaattcgctaactacggattcaacagaagccatgctgtcgcatacagcatgatcggctatcagctcgcctatttaaaagcgcattatccgttatattttatgtgcgggctgttgacgagcgtcatcggcaatgaggacaaaatatcgcaatatctgcatgaagcgaaggggagcgggattcaagtccttccgccgtcaataaacaaaagcggttttccgtttgcgccggaaaacggagccgtcagatacagtttgcgggccgttaaaaacgtaggcgtctcggcagtgaaagatatttataaagcaagaacacataaaccgttcgaggatcttttcgatttctgctttcgcgtacccgcaaaaagcgtgaatcggaaaaccatcgaagcccttatattttctggcgccatggacgaattcaatcaaaatcgcgccgccttgctggcctccgttgatgtggctttagagcacgctgaactttttcgtgcagacgatgaccaaatgggattgtttttggaagaatcgttctccattaagccaaaatatgtagaggctgaggaatttccgctcgtggacaagcttcggttcgaaaaagaagctctcggtgtttatttctcaagccatcctttgtctgctttcagggatctcctgaaaaaacggggggcgcaagcgatcacagcagcgcggcagatgccgaaggggcagctgtcaattggcgctttgctcgcgggcattaaaacgattcggacaaagacaggtcagcatatggcgtttctcacattaagcgatgaaacgggagaaatggaagccgtcgtgtttcctgaccaatatagaaggctgtctccgctgttagaagaaggcgcgctattattcgccgccggaaaaatggaagagcgtcaggagaagacacaattcatcatgtcatcttgctctcttcttgagcagacggaggcagacagagcgccgtctgtttacatcaaaatcgaaggcatccggcacaatcaggagtttttggaaaagatgaagcgtattttactggagcataaaggggaaaccggcgtttatctatattatgaaaaagacaagcagacgatcaggctgccggatacttttcatattcaggcggaccatcaggcgttataccgtttaaaagagctgctgggccgcgaaaacgtcgtgttaaaatagtggtaacaataatcgttttgttatacaattgaaacaattgtgctatcttatttaaagattctgaaatttttcacctccagcgattgtaccagtctatgcggcagaatatgtaacaaagtacttaaaaggagtgtttagaatgtcattaagagaagaagcgttacatttacacaaagtaaatcaaggaaagctggaatcaaaagcaaaggtagaagtcagaaatgcagatgacttaagccttgcctactctcccggagtagctgagccttgtaaagagatttatgacgataaaaacaaagtatatgattatacaatgaaggggaacatggtagcagtcgtaacagacggatcagccgttctcggactcggtaatatcgggcctgaagcttcacttccggtcatggaagggaaagcggtgctgttcaaaagtttcgcgggcgtggatgcattcccgatcgcgcttgacacaaacgatgtggacaaaatcattgacactgtaaagctgcttgcaccgacattcggcggtgtcaaccttgaagatattgcggcgccgaactgcttcattatcgaagagcgcctgaaaaaagaaacaaacattccggttttccacgatgatcagcacggcactgccatcgtaaccgttgccggacttgtaaacgcgctgaaattatcaggtaaatccatgtcatccattaaagttgtggcaaacggagcgggagcggcaggcatcgcgatcatcaagcttctttaccatttcggcgtacgcaacatcgtaatgtgcgactctaaaggggcgatttacgaagggcgtccggccggcatgaacgcagtgaaaaacgaagtggcgaagtttacaaaccaagaccgcaacgacggttcgcttcaggatgtcattaaagatgcagacgtctttatcggcgtatcagtcgaaggcgcgctgacgaaagaaatggtggaaagcatggcgaaagatccgattatcttcgcaatggccaacccgaatccggaaatcatgcctgaagacgcgcgcgcagccggcgcaagcgtaatcggaacaggccgttctgatttcccgaaccaggttaacaacgttctggcattccctggaattttccgcggggcgcttgacgttcgcgcgactcacatcaacgaagaaatgaaaattgctgcggttgaagcgattgcttcccttgttacagaggaagaattaagcgctgattatgtcatcccggctccatttgacaaacgtgtggctcctgccgttgcgaaagctgttgcgaaagcagcgatggaaacgggcgtcgccagaattacggtcgatcctgaggaagtggctgaaaaaacaagacagctcacggtcatcggcgaataataacacaaaaatgaaatggcagcgcgttggaaaaaaacaacgcgctgctgttcaatatacggactgctggcatttttttaagggcaggtcttaaaaaaatttcagcagaatccttatttcttttgaaagcgctgacagataaggctgaacaacgctttttacggtatgaaatccgtccgtttccgtctgttttgaagcaaaaaatgtcgaatggaggatgacaccgtttgacaaaaaaagtacaatagtttcggtaaagttattattaagtctatctaatcggaagacatgcagtgaagagaacccttcacaaaagggaggtaatcatttgttaaaggatatattcacaaaaaagaaaaaatatgcttccgtgccgtctgagcaggcaaaacatgatgttccggaaggcattatgacaaagtgccccaaatgtaaaaaaatcatgctcacaaaagagttagataaaaacctgcgcgtctgcatgaactgcgggcaccatttcccgatgaatgcaaagcagcgcattgaaagcctcctggatgaagattcattcgaagaattcaaccagggaatgatatctgaaaacccgctcggtttcccggaatacttagaaaaaatcgaaaaagaccgtgagaaaacatcgctgaatgaagcggtggttaccggaaaaggaaccatcagcggattcccggccgtgatcgcgatcatggattcaacattccgaatgggcagcatgggttcggttgtcggcgaaaaaatcacgcttgcaattgaaaaggcaaaagaggaaaaagtcccgtttatcatctttaccgcttccggcggcgcacgtatgcaggagggggtcttaagtcttatgcaaatggcaaagacaagctctgcattaaaattgttcagtgaggagcagggactgattatttctgtcatgacccatccgacgacaggcggcgtatcggccagtttcgcgtctctcggtgattataatttcgctgaaccgggcgccttgatcggatttgccggaagacgtattattgaacagacgatcggggaaaaactgccggaagatttccagacggcggaatttttattaaagcacggccagcttgatgcggtgattcaccgaaacgacatgaaagacaaactcgcatttctgctggacatgcaccaaacaggaggtgagcatgagtggctgcaagattagaatttgaaaaaccagtgattgaactgcagacgaaaatcgccgaactgaaaaaattcacccaagattcggagatggatttaagcgctgaaatcgcaaggcttgaagaccggctcagcaagcttcaggatgagatttataaaaacctgaagccgtgggacagagtgcagatcgcacgccttcccgaccggccgacgacgcttgattacattcaatacctgtttaccgacttttttgagtgccacggagacagaacatacggagatgatgcggcgattgtcggcggagtcgccaaatatcacggcatgccggtcaccgtcatcggacatcagcgcggaaaagacacgaaagaaaaccttgtccgcaatttcgggatgcctcaccctgagggctaccgcaaagcgcttcgtctcatgaagcaggcggataaattcaaccgcccgattatctgcttcatcgacacgaagggagcgtacccgggtaaagcggcggaggaacggggacaaagtgaagccatcgccaagaacctgttcgagatggccggcctgacagtgcctgtcgtttgtatcgtcatcggggaaggcggcagcggaggcgcgcttgcgttaggtgtgggcaaccgcatgctgatgcttgagaactcgacgtattccgttatttctcctgaaggagccgcgtccattttgtggaaggactccagccttgcgaaaaaagcggccgaatccatgaagattactgcgcccgatttattagaattaggaattattgacgatatgattaaagaagtgaagggcggagctcaccacgatatcaagcagcaggcgggctacattgacggtatacttaaagaaacgttaaaatctcttcttcaattgaacgccgaagaattgatctcacagcgctatgaaaaatataaagcaatcgggaaagtttcggttgaggatcaatatatcggggtaaactgaatagacgtgaagcctatggctcacgtttattttttgtgatttttgtgatattccttaaattttatttaaaaacaatttatttaattgtataataggtaaggtttcatgggagctcaggcgtcccttttcattgttttagggcaatgatcatgatatgtttaacatatatatgttgctgaggtgaataggaaatgaagcgtataggagttttaacgagcggcggggattccccgggtatgaacgctgcggtgcgcgcggttgtgcggaaagctatctaccacgacgtcgaagtgtacggaatttataacggttattcaggattaatcagcggaaaaatagagaaactggagcttggttcggtcggtgacatcatccaccgcggcggaacaaagctgtatacggccagatgtcctgaattcaaaacagttgaaggccgtgaaaaaggaatcgaaaatttaaagaaactcggcattgaaggtcttgtcgtcatcggcggagacggttcatacatgggtgcgaaaaaattaacggaacacgggtttccgtgtgtgggtgtaccgggtacgatagataatgacatcccgggaactgattttacgatcggatttgatacggcgttaaacaccgtaattgatgcgattgataaaatccgtgacaccgctacgtctcatgagcgtacatacgttattgaagtgatggggcgccatgcgggcgacattgctttatgggcaggtcttgcaggcggagcggaatcaattttaattcctgaagcggactacgatatgcaggaaattatcggccgtttgaagagagggcacgaccgcggcaaaaaacacagtatcatcatcgttgcagaaggggtaggcagcggggttgaattcggaaaacgcatcgaagaagaaacgaaccttgaaacacgggtatccgttttagggcatatccagcgcggcggatctccaagcgcttctgaccgggttcttgcaagccgcctcggcgcttacgcggttgagcttctgcttaaaggaaaaggcggacgctgcgtaggtatacaaaacaacaagcttgtagaccatgatattatagaaattttagaatcaaaacatactgttgaaccaaacatgtatcagctttcaaaagaactgtctatttaaggcggaagaagctgaagatttcagaaggaagtgaacgagttgaaaaaaacaaaaatcgtttgtacaatcggtccggccagtgaaagtgtagaaatgctgacaaaattgatggaagcgggtatgaacgttgctcgtctgaatttttcacacggtgatttcgaagagcacggcgcaagaatcaaaaacatcagagaagcaagcaaaaagctcggcaaaaacgtggggattctcctcgatacgaaaggtccggaaatccgcacgcacgatatggaaaacggcgcgcttgagcttcaggcgggaaatgaaattatcgtttctacgaaacaggtgctgggaacgcttgaaaaattctcagtttcttatgaaggcctggcagacgacgtgtcagcagggtctatcatcctgttggatgacggtttaatcggattggaagtgctagaatcaaatccggaaaaacacgaaatcaaaacaaaaatcttaaacagcggcacgctgaaaaataaaaaaggcgtaaacgttcccggcgtcagcgtcaaccttcccggaattactgaaaaagacgccaaagacatcgtattcggtatcgagcaaggcgttgatttcatcgctgcgtcatttgtacgccgttctacggatgtcctggaaatccgcgaactgcttgaagagcataacgcgtctgacattcaaatcattcctaagatcgagaaccaggaaggcgtggacaacctggatgcgatcctggaagtatctgacggcttaatggtagcgcgcggagacctcggcgtagagattccggccgaagaagtgccgctcgtgcaaaaagaaatgatcaaaaaatgcaacgcgctcggcaaaccggttattactgcgactcaaatgcttgacagcatgcagcgcaaccctcgtccgacacgcgctgaagcaagtgacgttgccaacgccattttcgacggcacagatgctatcatgctttccggtgagacggctgcgggacaatatcctgtcgaggcggttcaaacaatgtttaacatcgccacacgcacggaagaatctctgaactacaaagaaattctgtctaaacgcagagatcaggtcggcatgacgattaccgatgcgatcggccaatcagttgcgcacacggcgatcaatctgagtgcggcagctatcgttacccctacagaaagcggccatacggcgcgtatgatcgcgaaataccgtccgcaggctccgattgtagccgttacggttaatgagtctgtatcacgcaaactcggccttgtattcggcgtatttccggcaagcggccaaaacgcgaattcaaccgatgaaatgcttgaagacgcggttcaaaaatcacttgacagcggcatcgtgaaacgcggtgatctgattgtcattacagcaggttctgtcggtgaatcaggcacgacgaatctgatgaaagtccacactgtcggcagcgttatcgcgaaagggcaaggcatcggacgcaaatctgcattcggtccggtcgttgttgcaaaaaatgcgaaagaagctgaacaaaaaatgacagacggcgcagtattggttgcttcaagcactgaccgcgacatgatcgcttcacttgaaaaagcatcagcgctcatcactgaagaaggcggtctgacaagccatgcagccgttgtcggtttaagcttgggcattccggttatcgtcggtctggagaacgcaacttcagttttaacagaaggacaggttatcacagttgacgctgcccgcggcgctgtgtatgaaggccgcgcaagcgttctttaaacagctttaaaaaagagaggggggttctcccttctcttttgtctttaggctgatttttctattcccatgcgggcggtgacgcgcttttagaagggcaggagggcagaaaaatgagagtgttattcttactgtttatcgtgtgtccggcaattgaaatcggtttgtttctgctggcgggaaaatggctcggtatttttccgaccttccttctcatcattttgacaggcgtgttaggcgccttggtggcaaaaagacagggaaccgatgtgtatcatcgggtgatgcgcgacctgcagcacggcaaaatgccgggggaagcgcttcttgacggaatatgcgtctttttcggaggcctgcttttgatgcttccgggttttctgtccgatattgcaggggcctgtcttctgattccgttcactcggaaccgcatgaagccgcttttgttcaaatggctgagaggaatgtcaaaaaacaagcggatcattatcaaataaaaacggcagccttcttacagggctgctgtttttatttggactgaacagtaatataggcccatatttcttttaaagcgcccgttgtgataaaggcctgaatgaaaacgagcagcgcgggccccgcagccagtcctaaaattccgaacaatttaaagccggcaaacagagcgattaaggtcgcaagcggatcaagtccgattgacttgcttaaaattttcggctccgtcagctggcgctggataagaaccacaatatataaaacaccgagaccgatcgcttgaggaagctgaccggcaatggccaaatacataatccagggaacaaagaccgacccggcgccgagatacgggagaaggtccaccaggccgataaaaaaggagatggttgccgcatgctcaatccctaaaagaaaaagtccgataaagacaatgatcatcgtgaaaagtatgagcacggcctgcgccttaatgaaacctgccatcgcttttttcagctctcccgatacggccttggcgtttgccgaaacccgttccggaaaaatggaataaagcagcgccttcagcttatgccagtcctttgtcataaaaaaagtcgccagcattgcgaaaatgaagacggcagctgtattgggaaggaaggcaatccatttcggcaccagctccaaaagatgtgaaagcatgagccccgcatttttagctgctgtatcaccgagggtctgaatatgcgtcacgatggatgcctgctgattggtttcaagcccgttaaataagacggtcagctcgtggtacaatggctggatgcgggaagtgaacagctcttcgcaatacgtcataaaggcgctgatatggggagggagcgttttggccagataggcggttcccgaaatgatttccgcaacgagaaatgtcgccgcgccgagaagaataagcaaaaagaagaccaggacaatgactgtattgactgatcggggcatccccgtcagtttgtccagccagtcaactacgggaatgatcgctgatgacagaataagggcgatcagaaacggataagttaacggaaatgaggcgtaaccggccgctaaagcgccgccggccgcagcgagtacaaacagcgcgcggaaaaaaacagttgcatagtgcggattcacatcgatcctcctctcggtcggcacgtcctattacattagtttattcgtcaaaaaaaaggatatgaatacagatatgatgaaagaaggtgctttcaggatgtttacacaggcgaatttatttttactattattgctggccatcgcattggtagccaaaaatcagtcattgctttttgccgtcggctttctcattgtgataaaagctgtcggtcttgatcagaaactatttccggttattcagtcaaaaggcatcaactggggagtcaccgtcattacaatcgccgttttagtgccgattgccacaggcgatatcggttttaaacagctcggagaagcgatgaaatcatattatgcgtggatcgctctcggtgccgggatcgcggttgccttaatcgccaaaaacggtctcaccttattggaaaacgaccctcatattacaacggcgctggtcatcggcacgatacttgccgtcgcgcttttcggaggcgtcgccgtcggcccgttaatcggcgccggaatcgcctacttggccatgcaaatcgttaaaatgttcacttcgtaaagtaaaaaagcggcgtaaagctgctttttttgtggagaaaattagagtttgcaccttcgcattttgtagttcagacaaatgccatttgcattattccgatgaatgaagcggcttaccatgtaacaaagaacttcgggattgacggcgcacatggagcgaaaacagcgattgcagtagattaaaagctgatgggatttatgggcctgataccaaagcaaaacttgaagtgttgttaaaataagcggagaccctctttccttcaatttgaaagtttgttagatttataatgagaatgaaaaaacacaattcggttggtagtccggatgcatgatttaaaatgtcagtaaccttcccctcctcgggatgtccatcattcttcagtaaatttaggaggagggaatcgttatgaaattaacggtttactacgatggtcagttttgggtaggagtcattgaagttgtgaatgacgggaaattaagagcaattcgtcatttgtttggacaagagccaaaggattcagaaataatgcattttgttaataatcaacttttacagactctctcccacactgaacaagaaggggtttgtgttaaagcaaaatctaagaaattaaacccaaaaagattgcagcgacaagcttctaaagagatgaaaaatatcgggatatcaactaaggcacaaaaagcgataaaacaggagcttgaagcaagaaaagaaaagaaaaaacaactgaatagaaaacaaagagaaaaaataaaggaacaaaaatatttaatcagaaaacaaaaagcaatagaaaagcataggggaaaatagttggagagcccgatgaagcccttcgattgaaaagttgagcggcatcagttagtttcttcggactgatttagagaaaaagaagtataagtcagagcccttctcgagatgaggagggtttttctgccatttatttaaattcacttatatcagtaaatgagtcagtttcaattgatgaacggtttgataaggatatttacagcccgaaaacagcgcaaatgcagtcaaacgattccagtccatgtgcggcatgactgctgacggcatttattggccaaagacaaagatgaaaatcagcgttaaagaaacaggaaaaattagataaagaacgaaaaaaaatttctaaatatagttggattggtatattattgaaccctgcatatgtgctaacaatagcagctttaaataggtgtaacagcaggtaaattactaaagaatctaaggttagtatttgggttctaatatttgggtagggggaaataatgctatcacttaatagagctttaaaattacgtgatttagaagtttttcgtgtgctgaaagatggtaacattttatcttacgtaataattgaagatactcgaaagccatttacagaagaagacaaaaaattagaaccactgtgttatatggacgaagaagatattaatgcgattttaaacgtttttaagatttcaattgttaatgatgaaaaattaaatgaagatgattcaatttttataagatcttacttttctgaatttgttaatcatacaaatttaacgaattttattattaaagaatatgttcaaaagaatttatatgattacgatgatgaagatgacatcattttttttaatagaattttacgtagtataggatcagattatgttatcaaagaatttgacgatataaattggatttatttatctcaagattgatttcttatttagattttgaaggagtacagaagataatttctgtactcctttttaaggcgaaaaatagacttctagtttctcttatagcataaatacacttgacaaaatcgtaagttcagcacgcgcaaggagtgtatataagtgctttattgtcatggatgttctatttccaaaatcgctatcaattttttgttattttcggttaattaggaaaattgcggtatttttcgtttacagaaaataagaaaatagtggaaaataaatcaaaagaggaggaggggaatgcatggtggagtctcaacttcaaatacagcggggggattgtttgtatgaatattaaaaaagcaatttgtttctctgtctctgctttcgctattacgttcggtgtaattgcttttgtaggaaacacgactcatcttcaccataatgcagccaaaactgataacgaggtaatacaactagctgcgcgactgcaaacatgatttcgaaacaaaaaagatgtggcctttttagggctgcatctttttttgtcatgtattttcgttttttctctttttaggcggggctgcggctgctgcatttataagcatgtaacaggttatgttgcttcaaagggtgatattcgtttgaagtccgcagaaaaatggatcgttctatacacaaaagcgaaatacgaagtaacaacaaagatatatataagaaaatttgagccaactaaaaccaagacatggatttctgaagctgatccgaacattgattcagtcgagtaaacaaaataacccccttctccggtaaagaaggggggttaaatttgcggtgaagttgtcgcgcctgtccttttaaagtctcctccaaaactcccccaaatgaaaacatgagaatacatggttttacaaagcgcctgaaagcaaacgattaaatttatcaacgccaagccttgatatatagggcttttaaaacatttttagttaaaagtctacaaattaatcagattattgtttataataagaataggcttaaacttaaataagcttataagaatttgttatgttcctctataagcatatcggttatgtaaccgcaaccagtgaaatgtaagcattttcttgaaggggaaagggagtgtttgcatgactcattttaagtaagccgtatgttttatatactctttaaaggggaattttgattgaaaaggagaggttgaatatgacagcaacacgcggtcttgaaggggttgtagcaacaacatcatctgtaagctctattatcgacgatacccttacatatgtagggtacgatattgacgacttgacagagaatgcaagttttgaagaaatcatttatttgctgtggcatctgcgcctgccgaataaaacggaacttgctgaactgaaaaaacagcttgcgaaagaagctgccgttccacaagaaatcattgagcacttcaaatcctatcccctcaataacgtacatccaatggctgctctccggacggcgatttcattactcggtctgactgacagtgaagccgatgccatgaatccggaagcgaactacagaaaagccatccgtctgcaggcgaaagtgccgggcattgtcgccgctttctcaagaatccgcaaaggacttgatcctgttgaaccgaaggaagagtacggaatcgcggagaacttcctttacaccttaaacggtgaagagccttctccgatcgaagtggaagcgtttaacaaagcgctcattcttcatgcggatcatgagctgaacgcatcaacatttacggcgagagtatgtgtcgccaccttatctgatatttactcaggcatcactgccgccatcggcgctttaaaagggccgcttcacggcggagccaatgaagccgtcatgaaaatgctgacagaaatcggcgaagtggaaaacgccgagccttatatccgcagcaaaatggagaaaaaggaaaaagtaatgggcttcggacaccgtgtgtataagcatggagacccgcgcgccaaacacttaaaagaaatgagcaaacgcctgacgaatctgacgggtgaaagcaaatggtacgatatgtcaatccgtgtcgaagaaatcgtgacgtcggagaaaaaactcccgcctaacgttgatttctattccgcatctgtataccacagtctcggcattgatcacgatctgttcacgccgatctttgcggtcagcagaatgtcaggatggatcgcccatattcttgaacagtacgataacaaccgcctcatccgcccgcgcgctgattacacgggtccggataagcagacttttgttccgattgatgaaagagcctgatcaaacgggaggctggtgattttcatgtcgttagcctcttgttaatcaagcccggattggtttacaattttgatagaatcttgagaaaagtcattttattttctatacaagaaaaataaaatgttttctaaatatgaattacatactgggaggtaatattgtgtcacaaggtgaaaaaattacagtctctaatggagtattaaacgtaccaaataatccgattatcccgtttattgaaggcgacggcacaggccctgatatttggaacgccgcttctaaagtattggaagccgctgttgaaaaagcatataaaggcgagaaaaaaatcacatggaaagaagtttatgccggtgaaaaggcttataataaaacaggtgagtggcttcctgccgaaacgctggaagacatcagagagtacttcatcgccatcaaaggtcctctgacgacaccggtcggcggcggtatccgttctctgaacgtggcgctgagacaggagcttgatttgtttacgtgcctgcgccctgtcagatatttcacgggagtgccttctccggtcaaacgacctgaagatacggatatggtcattttccgcgagaatacggaagatatttacgccggaattgagtatgcgaaaggttctgaagaagttgaaaagctgatcagcttcctgcaaaatgaaatgggtgttaacaaaatccgtttccctgaaacgtcaggaatcggcatcaaacctgtttctgaagaaggcacaagccgcttagtcagagctgccattgagtatgcgatcgaaaacggccgtaagtctgtcacgcttgtccacaaaggaaacatcatgaagttcactgaaggggcatttaaaaactggggctatgagcttgccgaaagagaatacggagataaagtattcacttgggctgaatatgaccgcattgtcgaaaaagacggaaaagaagcggctgataaagcacagagcgacgcggaagcggcaggaaaaatcatcgtcaaagacagcatcgctgatattttccttcagcagatcttaacccgtccgagcgaattcgacgtcgtggcaacaatgaacttaaacggagactatatctctgatgcgcttgccgctcaggtaggcggaatcggaatcgcgccgggagcgaacatcaactatgaaacagggcatgcgattttcgaagcgactcacggaacggctcctaagtatgccggccttgacaaagtcaacccgtcatccgtcatcctttcaggagtgcttcttcttgaacacctgaactggaatgaggctgctgacttgatcattaaatctatggaaaaaacgattgcttcaaaagtagtaacgtacgattttgctagattaatggacggcgcaactgaagtgaaatgttcagagtttggtgaagagctaattaaaaacatggactgaacctaaagcagacttctaatgaagccaaaaaaggagaagagaatcatgggaaaaacacgcagtaaagtttctgttatcggagcaggatttacgggagcgacaacagcctttcttacagctcaaaaagagcttgcggacgttgtgctcgttgatattccgcaattagaaaacccgacaaaaggaaaagcgctagacatgctcgaagcaagtccggttcaaggatttgacgcgaaaatcacaggcacgtccaactacgaggacacagccggttctgatatcgtcgtcatcacagccggaattgcgagaaaaccgggcatgagccgtgatgatctcgtatctacaaacgaaaaaatcatgagaagcgtcacacgtgagatcgtgaaatattctcctgactgcattatcgttgtattgacaaaccctgttgatgcgatgacatatgcggtgtacaaagaatcaggcttcccgaaagaacgcgtcatcggacaatccggagtgcttgacactgcgcgattcagaacattcgtcgctgaagaattaaacctgtctgtaaaagatgtgaccggttttgttcttggcggacacggtgacgacatggttcctctcgtccgttattcctatgcgggaggcattccgcttgaaacgcttatcccgaaagaccgtcttgatgcgattgtagaacgtacaagaaaaggcggcggggaaatcgtcaaccttctcggcaacggaagcgcctactacgcgcctgctgcatcactgactgaaatggtagaagccattttgaaagatcagcgccgcgtgcttccgaccatcgcttacttagaaggcgaatacggtcatgaaggcatttacttaggcgtaccgacgattatcggaggaaacggcctagagcaaatcatcgagcttgaactgacagactatgaaaaagcgcagctgagtaaatcagttgaatctgtcaaaaatgtgatgaaagtattgtcataagaaaaaagggaaggcttccgaatcagaagccttcctctttttacaattaatgaaagcgttttctttttccctgagcgatcctttctctgaaaatgatcaaaaaggcgaattgtctgaacgggcagtattggataaaatgaaatcataaagtgatatgcagcacataaaatagagaaaattggatgtcggggaaaatagacagcggagggcgcagcatgaacaaaaaaattttagttgtagatgatgaacaatctatcgttactcttttacagtataatctggaacggtccggctatgatgtcattaccgcatcagacggtgaagaggctctggagctggcagagaatgaaaatccggatttaatcgtactggatgtcatgctgccgaaagtggacggaatcgacgtctgtaagcagctcagacagcagaaaatgatggtcccgatcttgatgctgacagcaaaagatgaggagtttgataaagtgctgggactggagctcggagcggatgattacatgacaaagccgttcagtccgcgggaagtcactgcgcgggtgaaagccattttaagaagggctgacatttcttcgctgtcacaaggcagagaagaggaaaaggacgggcagatcctcatcggtgagctgaaaattcttccggagcattacgaagcgtactttaagtcagaacagctggaattgacacctaaagaatttgaactgcttctgtatttgggaaaacataagggaagagtgctgacgagagatcttctgctgagcgcggtctggaactatgattttgccggggatacccggattgttgacgttcatatcagtcatctgcgcgacaaaatcgaatcaaataccaaaaaacccatctatattaaaacaatcagaggtttggggtataaactggaggagccaaaaatgaatgaataaagtccgtgtgcgtctgttcgctttactcgttgtatgtatcatattggttttcagtgttctcggcctttttttacagcagcttatttcttcatccgctgaagaaagaacggcggatcagctgaaaaaggaatcggtatacatagcgggccttcttgacgccggcagaatcggcaataaaagcaatgaaacggtaatccgtgacgccggccgcaccctgggtataaacgtctccgtgctcaatgagaagggggacgccgtatatcattccggcagtcgtgctgatgattcagccgtaaaggagttcatttctcacaataaaagcgaggaagccgtacagtcgaaaaccaaagtcatccgcggcactgccgtaaaaaatgacgccgggaaaattgcggggtatgtactcgtttccgctgagatcaacggcggttcaagcgttaccggagaaatgtggggcatgctggcagcaagtctttgtaccgcttttatcattatcgttttcttttatacaaacatgacgtcccgttacaaaaaatcaatcgacgccgcgacaaaggtggcgacggagctgtccaaggggaattatgacgcccgctcctacagcggttacgcaaggcggtcggaccgtctcgggcgtgcgatgaacagcctggcggtcgatttaatggaaatgacgagaacgcaggatatgcagcgcgatcgtctgttaaccgtcattgaaaatatcggatctggtttgattttaatagacgggagaggttttatcaatctcgtgaaccggtcatacacgaagcagtttcatacaaagcctgaacgtctgcttcggcgcctttaccatgatgcgtttgaacatgaggagatcattcggcttgtcgaagacatttttatgacggagacgaaaaaatgccagctgctcagacttcccatcaacattgagcggcgctactttgaagttgacggcgttccgatcatgggccctgacgatgaatggaagggcatcgtcctcgtctttcacgatatgacggaaattaaaaaattggagcagatgagaaaggacttcgtcgccaatgtctcccatgaactgaaaacaccgatcacctccattaaaggctttacggaaacactgttagacggagcgatgaaagacgaaaaggcgctttcagattttctgtctatcattctgaaagaaagtgagcggctccaatctctcgtgcaggatttactggatttatccaagatggagcagcaaaactttacgatgcgcgtagagtcctttgacgccgcaaaaattctgcatgaaattgaagcgcttttgcggcataaggctgaggaaaaaggcatcagctttcagctcgatctcccggaagagccgatttttgtgacgggtgatgcgcacaggctgaagcaggtgtttttgaatctggcgaacaatgccctgacctacacgcctgaaaaagggacggtggggatttcggtacatgtgaaagaaaccgttgtcgatatcaaagtgtccgatacgggaatcggcattcagaaggaagagatcccgcggatatttgagagattctaccgcgtggataaagacagaagccgcaactcgggaggaaccgggctcggcctcgccatcgtgaagcacttaatagaagcccatgaaggtaaaatcgaggtcacaagcgagccgggacaggggactgtatttaccgtgacgctgaagcggcagccggaagcgtgaccagctttacaaaggattaacaatttcttcatgacctgttaaacctatcttgttaggatataacagaaccccttcatccaaggagccaattttgacggcgggaacgtgttttcttgttcccgtccttttttgcgttttcacggggttcgctcattttcctttcaaattgaactttgttaaaataagagaagctgtgagattaaaaaatagaggaatgacgagcttttgctcttaggaggatattgaatgacggaacgaaaaaaattagtgcttgtcgacggaaacagtctggcgtaccgagcgttttttgcattgccgcttttaagcaatgaaaaaggcatccatacaaatgccgtatacgggtttgcgatgattttaatgaaaatgctggaagatgaaaagccgacccacatgctggtggcttttgatgcgggaaaaaccactttccgccacagtacgtttaaagaatataaaggcggaagacaaaaaacgccgccggagctttcagaacagatgccgttcatccgcgagctccttgatgcctacaaaatcagccgctacgagcttcctgaatatgaagcggacgatattatcggcacccttgccgtatctgctgaaaaagaaggcttcgaagtaaaggtagtttcgggggacaaggacttaacccagcttgcaaccgggaaaacgaccgttgccattacgagaaaaggcattaccgacgtggaagattacacgccggagcacgtgcaagaaaagtacggtctgacccctttgcaaatcattgatatgaagggattaatgggggattcatccgataacataccgggcgtccccggcgtcggagaaaaaaccgcgattaagcttttaaagcagttccattcggttgagaaactgcttgattccattgatgaagtcagcggaaaaaaattaaaagaaaagcttgaagaatataaggaacaagccctgatgagcaaagagctggcgacgattatgacaaatgcgccgattgaagtcaagcccgaagatttagattaccaagggtttgaccgtgaacaagttgttgccatttttaaagacctcggttttaatacgcttcttgagcggctcggtgaagaaagcggcgaaacggcggaagaaaattttgaagacatcaatgttgaaacggcagaagaaatcactgaagatatgctcgtttcgccgtccgctttggttgttgaacaaatcggtgataactatcacgaagaaccgatcctcggcttttccatcgtgaatgaaacaggtctttattatattccgaaagaaatcgccattcagtctgaaacttttaaatcttgggctgaagatgaatcgatgaaaaagtgggtgttcgacagcaaacgttcagtcgtcgctttgcgctggcagggaattgagctgaagggaacggaatttgacgcgcttcttgctgcctacattataaacccgggcaattcgtacgacgatgtcgcgagcgtagcgaaagaatacgggctgaatatcgtttcaaaagatgaagcggtatacggaaaaggcgcaaagcgcgccgttccggctgaaaaagagcttgccgatcatctcgcgcggaaagcgtctgccgttaacagcctccgtgacaaactgctgcatgcgctggaagaaaataatcagcttgaattatatgaagatctcgaactcccgcttgcgctaattctcggagaaatggaatcaatgggcgtcaaagtggatgttgaaagactgaagcgaatgggcgaagagctcaaggcaaagctgaaagaatatgaagaaaaaatccatgacatcgccggtgagccgtttaacatcaattcaccaaaacagctcggcgtcattctgtttgaaaagctcggcctgccgccagtaaagaaaacaaaaacaggctattccacttcagccgatgtgcttgagaagctcgcagacaaacatgatatcgtcgcgcacattctgcaatacagacaaatcggcaaactccaatcgacttatattgaagggctgctgaaggtcacgcgcaaggattctcataaggtgcatacacgattcaatcaggcattgactcaaaccggacgcctcagctcaacggatccgaacctgcaaaatattccgatccggctggaggaagggcggaaaatccgtcaggctttcgtaccgtccgaaccggactggcttattttcgccgccgattattcacaaattgaattaagggtgcttgcgcatatttcaaaagatgaaaatctgattgaagcgtttacgaatgacatggacattcacacaaaaaccgccatggacgtgtttcatgtcagtgaagatgaagtgacacaagcgatgcgccgccaggcgaaggccgtcaatttcggcattgtttacggcatcagtgattacgggctgtcacaaaacctcggcatcacccggaaagaagcgggcgcttttatagaccgctatttggagagcttcccgggcgttaaggcgtatatggaagaatcggtgcaggaagcgaagcaaaaaggatatgtcacgacccttatgcagcgccgccgctatattcctgagctgaccagccgcaacttcaacctgcggagctttgcggaacggacggccatgaatacgccgattcagggaagcgccgccgatattattaaaaaagccatgattgacatggcagctgagctgaaagaaaaaaacctgaaggcgcgactgctgcttcaggtgcacgatgaattgatttttgaagcgcctaaggaagaaattgaaatattagagaagctggttcctgaagtgatggagcatgctttggcattagacgtgccgctgaaggcggattatgcttcagggccgtcttggtacgatgcaaaataaacagagaaaaaggaagtgatgattgtgccggaattaccagaagttgaaacggtccggcgcactctgaccggtcttgtgaaggggaaaacgattgaatcggcggatatcagatggccgaatatcatcaaaaaacccgctgagccggaggaattcgcgcggcagattgcaggagaaacaatccgatccatcggaagaaggggaaagtttttgcttttccatctggatcattatgtcatggtgtcccacctgcggatggaggggaaatacggtcttcatcaggccgatgagcctgacgataaacatgtgcacgtcgtgtttcacatgacggacggaacacagctccgctaccgggatgtccggaaattcggcacgatgcatttgtttgcgccgggagaggaacagaatgcattaccgctttcacagctcgggcccgaacccgatgatgaagcatttaccgctgcttatttaaaagagcggcttgcaaaaacgaaccgcgcagtgaaaacagccctgctcgaccaaaaagcggtcgtcggcctcggcaatatttatgtcgatgaagctttattccgggcgcgtattcatcctgagacaaaagcgaacagtctgtcagacgggcagataaaaacgcttcatacagaaattaaagacacccttcaggaagcgattgacgcgggcgggagcaccgtccggtcttatatcaattctcaaggggagatcggaatgtttcagctcaaacattacgtatacggcaaaaaggatgaaccgtgcaaaacgtgcggcacgatgatttctaaaatcgtggtcggcggaaggggtacgcatttttgcgcccgctgccaaaaaaaatcataaactgaagctgttcaagcaggcggcagcagaatgacttttttctaacacagttgatgacctttctccatatatatattgtgattcacccaataggcatatgtcacaattgccgatcaagagaaagggagaaacggatatggagattgtttctttgctgcttttggcttttgctgtcagcttggacagtttttcagtcgggtttacgtatggtttgagaaaaatgaaaatcccgttcaaagcgattgccgtgatcgcttgctgttcagcctctgtgatgtttatatccatgctgatcggccattttctgacaaagatttttcccgtatccgtcacggaaaaactgggcgggctgatcttaatcggaatcggggcatgggtcatctggcaatttttcaaaccggctaaagagccggattacttattgcatgaaaaaacgttacttaatcttgaagtgaaatcgctgggcatcgtcattcatattttgaaaaaaccgaccagcgccgatattgatcaatccggaaccattaacggagtcgaggcgcttctgctcggtatcgccttatccattgacgcgtttggcgccgggctgggagcggccattctcggcttttctccggttatgatgagcgtgactgtcgggctgatgagctcgctgtttgtttcactcggcataaacgcggggcatttgctttcaagatggaattggatagataaaatgacatttttgccgggagtcctgctgattatcatcgggatttggaaaatgtaagaaggagtgggctttttgagcttggtcatcggtttaacgggaggcatcgcaagcggcaaaagcacggtagcgcgtatgctgatcgacaaaaaaataacagtcattgatgcggatgtcatcgcaaaacaggcggtggaaaaaggaatgccggcttacggacaaattgtggaggcattcggaaaagacatcctgctggaaaatggcggtattgacagaaaaaaactcggttctatcgttttcactgacgaacagaagcgtctgaagctgaatcagatcgttcatccggcggtgcgtgcggaaatgctgaaacagcgggatgaagccgttgcgcgaaaagagcagttcgtcgttttggatataccgcttttgtatgaaagcgggcttgattatcttgtcggcaaggtgctcgtcgtcaccgtaccggcagacattcagcttaaacggctgatagagcggaattcccttacagaagaagaagcgatgagccggataacgtcgcaaatgcctttagcggataaaacaaaaaaagctgacgccgtcattgataacagcggcagtcttgaatatacaaagcaccagcttgaggaagtattgagcagctgggcataaacaaacaccgttcggaaagccgaacggtgtttttctggttaaaaatcaaaattgtcagggtccggaccgacacggaggttttcgttcagatcatcaatccgcttcatatcgtcagctgacagttcgaaatcaaagacatttgcattttcttcaatacggtgttttttagttgatttcggaatggtgatgacaccgttctgcaaatcccagcgcaaaatcacttgagcggctgatttgccgtacttctcagcgatttcctgtaagacggtgtgatcaagcagctgaccttgcatcaatggcgaccacgcttcaagctgaatgccttgttcagtgcagaaagcaagcagttctttctgtgtcagacgaggatggtactccacctggttgatcatcggcttgatttccgtctctttcatgagatgtttcaggtggtgaatttggaaattgctgaccccgatcgccttaatgcgtccatcccggtagagggtttcgagcgcccgccacgcatcgatgtactttccttcgacaggccaatggatcaaatataaatccaaataatctaaaccgagtttttctaagcttgtgtcaaacgcttttaacgtttcttcatatcctaaatcggcattccatacttttgacgtgacaaaaatgtcttcacgttttaaccccgcttcttgcagcccttggcggatgccttcgccgacaccttcttcatttccgtaaatcgcggcggtatcaacgctgcgatagccgtgcaccaatgccgttttcaccgcgttgacgagttccgcgccttcctctactttgaaaactccgatgccgaaccaaggcatctctactccgttatgcaatgttgcttttgcttgtaaatgtgttgtcatgtatatattcctcctattagttgtctgttgaaacaatcaaaatgcgctgaagaaaaactcacctcctttcaagggcagtgcgatcccgcttttcaagcttcctgctccatccggttaatacgaccgcgctgagcaccatcagcgccccgatccaagcggtatgaatgattccgattgagtctgtaatgattccgccggcaaacgagccgatcgcgattccggcattaaatgccgcgatatttaaggctgatgctgtatcaacggcgcttggcgcaaaacgttcactcagcatcacaacatatacctgaagccccggcacattcataaacgccaacagccccatgaaaataatggtgatcagcccggctgttttaaacggtgcggtaaaagtcagaacaaacagcacagcagcctggacaatgaacatataaaacaaggctttcagcggatttcggtttgataaacggccgccaatcatgtttccgatggcaatcgcaattccgtaaacgagcaggatggccgcgacggtttctttctgaaaaccggttacctcctgaagaagcggagataaatacgtaaacacgacaaacgttccgccgtagcctaacgcggtaatgataaataaaagcaataaccggccgtttgtgacgagtttgacctgctcggaaaatgcggttttcgtccctttgcgcaaatgcgacggaacgaggagcgcgtttgtgaggaatgcgatgattcctaccgccacaatgacggcaaatgcgattctccatccgaattgctggccgagataggtgccgaacggaacgccggtcaccgtagccaccgtcagccccgtaaacatgatagaaatcgcgcttgctcttttatgctccggcacgatattggcggcgattgttgccccgattgacatgaaaatgccgtgggaaaaagccgaaatgacccgtgccgccagtaagacgccgattgaggaagcgctcgctgcgagtgtatttccggcgataaaaattaacatcacccagagcagcagcgttttccgcgacatgccggatgtgagagacgttaaaaccggcgcgccgaatgtcacgcccagagcatacatggaaacggtaagtcccgccgttgtcacaggtatatgcagatcttgagatataagcggcagcagcccgacgctgataaattcggttgtgccgatcgcaaaagcgctgacggctaatgccagcagcgctggtaaatagctttggcgatgtgaagacatctgttttcctccttgaacgataatgtatggttgaaatgatgccgggtaaacgatataagtataagagtacattccttttcagccggcaaatgtcattatgatcgatagaagtgtcattgaaaagaacgtacttttaagtgccataggcactttttagttcctatagatgaggaggaattaccgttgctgaagaaaaaatacaatatatccgtagaagcggcgcttgaagtgatcggcggaaaatggaagtgtgtgatcctctgccacctcatgcgcgggaaaaaacgcacaagcgaattgaagcggcttatgccggacatcacccagaagatgctgacacagcaattgcgggagctggaagctgacggcgtcatcaaccggatcgtgtacaatcaggtgccgccgaaagtggaatacgagctgagtgaatacgggcacagtctggaaagaattttaaacgcgctgtgcgactggggcgcgatgcatattgctaaacggtacggcgaggtgtcttccgttttagaggacagcattttaaatgacaaatttaaagaaccgggacaaatataagaaaaaagcaggcagcctgagacgctgatcctgctttttttatggaagaaagatcattttatatgcaaaaaaaccgattgaacaacatattgatcggtataagggtggatttttatcaagttgtactggcggatttcttttaatgtgttatactatatataaataaaggtaaattagagtggcatattaaaaaggggtgacctgagcatgaaggtaaaagtagcaatcaacgggtttggaagaatcggaagaatggtgttcagaaaagcaatggaagatgatcaaattcaaataacagccattaatgcaagctatcccccggaaacgcttgctcatttgataaagtatgacacaattcacggcaaatacgatcaagaagttgagacctccgacgacagcctgatcgtcaacggaaaacatattatgctgttcaatcgccgggacccgagagagcttccgtggaaagaatgcggaatagacatcgtcgtagaggcaacggggaaatttaattcaaaagaaaaagcgatgagccatattgaagcaggggcgaaaaaagtcattttaacggctccgggcaaaaatgaagacgttaccattgtcatgggagtaaatgaagagcagttcaatcccgatgaacatgtcattatttcaaatgcatcctgcacgacaaactgtcttgcgccggtcgtcaaagtgcttgatcaggaattcgggattgaaagcggcctgatgacgactgttcacgcttacacgaatgatcaaaaaaatatcgacaatccgcataaagatctgcggagggcgagagcgtgcggagaatccatcattccgacttctacaggcgccgccaaagcgctgtcgctcgtgctgcctcatttgaaaggaaaacttcacggtctcgctttgcgtgttcccgttccgaatgtgtcattagtggaccttgtctgcgatctgaaaacagatgtgtcggccgagcaagtaaacgccgctttccaaagagccgcaaaaacgtcgatgtacggaattcttgattattcggatgagccgctcgtttcttcggattataatacgaattcacactctgcgatcatcgacggactgacaacaatggtgatggaagaccgaaaagtaaaggtgctcgcctggtatgacaatgaatggggatattcctgccgggtcgttgatcttatccgtcacgtcgccgcgcgaatgaaacacccgtcagctgtgtagactaaagatcatggacatttgttagaaaaaaacccttaacggcatattcgcaaaaaacacaccttgcaaaataaacttaaacacagtatactatctttcgtgaacttcttgctcgtgactgcttcggaattacttaaagggttaggacctctccggactaactttcccccgtggtaaatggccgggtcagttctcggaaattcacttttttaattcttgttaaggggggtccatgattatggaaacaatggggcgtcacgtcatctccgagctgtggggatgcgattttgataagctcaatgacatggattttattgaaaaaacgtttgtaaatgctgctttgaaatcaggagctgaagtgcgcgaggtcgcatttcacaaatttgcaccgcaaggcgtaagcggagtcgttattatctctgagtcacatttaacgattcacagttttcctgaacacggatatgcaagcattgatgtttatacttgtggagacctggatcctaatgtggctgcggattacattgcggacgcattacatgcagatacaagagaaaacattgaaataccgagaggaatggggcctgtacagattaaacaggcacaagcgaaagtactgtaattttcaaaacgcaaacacaagggagctaagctgaaaaagccattacgcgctttgaagctgatgctccttttctaatgtaaaaaaacagcattgctttttctttaagcattttttttgtaaaatagaaaggataaggccggtctatcggctctcccaacaaataggctcatcctagaaacgttggcgggcatttaccggaagcttgcgaaccgcattacagcaacgaaacagatgggagctgatccaatttgaaatgtccttcatgccagcacaacggttcccgcgtacttgattcacggcctgcggacgaagggaaatcaatccgcagaaggcgggaatgcgaagcctgccattaccgcttcactacatttgagaagtttgaagagatgcctctgatcgtcgtgaaaaaagaaggcgtccgggaagaattcagccgtgaaaaaatgctgcgcgggttaattaaagcttgtgaaaaaaggcccgttcctttaaaaacattggaagacatgtgctttgacattgaaaaagagctgagaaaccaaggtgtatctgaagtcaaaagcgaacttgtcggagaaatggtaatggaccgtctggcgaaaatcgatgaggtgtcttatgtccgctttgcctccgtctaccggcagtttaaggatataaacgtgtttatcgatgaattgaaagatttaataaagaaagaacgctgagagagctaagagattgtgtctggctcttttctcatgagcaaaattggcatttgatagatcgcagaaacggtgtaaaatgagagtagaaacatatcggaaggtttgagaatcatggctgactattggaatgacgtattgcctgtagatccttatacggtcaaaagccgttcgcttcttcaggatgtcgacagacaggttttgacacatctgtaccagccgctgatcggttcttttgcattctccctttatatgaccttatggggggagcttgagcagaaccgcttgtggggagcggaatccacgcacaggcagctgatgggcatgatgcagtcaaatttaaaaaagattcatcatgaacagggaaagcttgaaggaatcgggctgctgaaagtgtatatccgggagtccgagcaaaaagagcggatgtttatttatgagctgctgcccccgctcagaccgaatgatttttttgaagacggcatgctgaatgtctttctttataacagagtcggtaaaacgaaataccagcagctgagacaattttacacgcacccttccgtcggcgcggacgcaagggaaattacccgtccgtttaatcacgcctttgcctcttttcagccgagtgaatggaaaatgacgcctgatatggaagaggcgatgaagctccccgaggactatgagacagcgtctgtcggacaagcgccttcctatacggtgacggaggaagtatttgattttgagcttttcatggcgggactgtcagaaacgatgataccgcgtaaatcaatcacgcaggacgtgcgggagagcattaaaaagctttcatatttatacggaatagatcctatctccatgcagcacgtcgtcatgaccgcaattaatgaacaggatacgataacggccgaagcgctgaggaaagcggccagcgactggtaccaaattgaaagaagcggtaagcttccggaactgattgataaaacacagcctgtcaccttgagagaaaaccggacggaaaaggacgattcattgaacggcgaactcatcgcacagcttgagaccatatcaccgagaaagcttcttcaggacattgcggacgggaccgagccgtcaaaagccgacttgcagattatcgccgatattatgttcgaacaaaagcttgagcccggcgtcaccaatgtgctgatttattatgtcatgctgaaaacggatatgaagctgtccaaaaactatatccaaaaaatcgccgcccactgggccagaaagaaagtcaaaacggtacgggaagcaatgaagctcgcaatagaagagcacaggcaatatcttgattgggcggacggcaaaacaaacggcgcggcgcgcggcaaaaaaaccgtccgggaagaaaagcgccctgattggatgaaagaagaagaaaccgggaagaaacaagaacagccggctctttccgcgcaggatcttgaagaacagaagaaaaaaatgatggaagaaatgaaaaaactgaaaaaatactctgcctattgagacagagaagcggggtgatattgaatggaaccgatcagccgatccttagaaggcgtgacgaaaagacctgactttcaaaaacgcctggaacgaatgcagcagcaagtcatggccgacgaagacgtccaggcttttttgaaggaacagaaagatgtaatcaatcaaagcatgattgacagagggttaaataaactgtacgaattcgttcagcaaagcaaacagtgcgccttctgttcgaaagacagccggacgaacagcctgcttgaaggctatcatccgaagcttgtgatcaacgggcgttccatcgatattgaatattacgaatgtccggaaaagagaaagctcgaccgccagaaaaggcaaaagtccctgatgaagagcatgtatatccagcaggatcttctcggcgcgacctttcagcagatcgacattaccgatccgagcagagtcggcattttccagcatgtgacggattttctgaagagctataatgaaacgggaaaaggcaaagggctgtatctgtacggaaaattcggaatcggaaagacatttattttagccgccattgctaacgaactggcggaaaaagagtattcatcaatgatcgtatatgttcccgaatttgtcagagagctgaaaaactcgctccaggatcagtcgttggaggcgaaactgaatatggtgaaaacgacgcccgtattgatgcttgatgacatcggagcggagtcaatgacaagctgggtcagagatgaggtcatcggcaccgtgcttcagcacagaatgagccagcagcttcccactttcttctcgtctaatttctcacctgacgagctgaagcatcattttacgtattcacagcggggagaaaaggaagaagtaaaagcggcaagactgatggagcggattttatatttggcttcgcccgtccgtcttgacggggaaaaccgccgccgttcatgatgccggcgtccaatgggaaggatttgaagggaatgaggaataagaaggctgtcacttgggctgcggctgcggcgggagcgggccttttgctgtgggcaaaccgcaaatatctgaatctgtcgcctaaggagatccggctgtgggtattatcgttcggtgtttttgcgccgcttgtgtttatcggaatttccatcgtcaggccttttgtgctgtttcccgtatcaatcgtttccgtcgccggaggattggcgttcggcccgtttttcggcaccatgtatacgctggcgggctcaatgggcgctgccgccgcgtctttttttgcggcggggctgtttgcctttaatgagaaaagccgtcatggaaaaatggaagccattcaaaaacagatgaaaaccaatggcttcttttatatttttatcctgcgtattctgcctgttaactttgatgtgatcagctatgccgcgggcctatcgaaagtcaggccgatgacgtattttttggcgaccgcagcgggcatcattccggggacgatcgtcttgaatgtgctcggcgcgagctttatgtccggaaatgtgctgaccgtactcggcgtgatctgtctttacatcgtatttttatcgcttcccgttatatttaaaaagaaggtgcgccatttgttcggcggtgaaagctaacctttacgtctattttaaaaacatcccccatatacttgtaacagatgccgtaaggggggacaaatatgcttgaagtgatctttgaagatgaccacgataccgccgcttttttacatctcattcagcaatcggacgaccggagacattttattgtccgtgaaggcataaaaaaagtcggaatcgcaaggtctgaaacggctttttgcgttcagcgctttattgagccgatacttgtcaggttttttttggaatgcaaagaagacgagcatatgctttcgcttattgaggatgcatactgcttcaccgatcaggatgaacagcagcaaatccttcagcttgcacacagcattatggaaggagagcttgatgatcatccgttcgagccgaagaaagagccgcgcacacagtttatttcagatgcgctccggacgatttcacttgatgcgggtgttttttccgtgcgttcgtttcagacgttccggctcggcaggtattatgagcggctcagagaatacgcggaggctgcgatagatgaataccggatggaacaggaatatcaaaactttatccagtctctgagagattatgtgacatccaatccgccgcggatgaagaaagtccgcatcgtacatgaccgggcttttacgctgtgggagctgcgctatttgtcagaacgggaacagaaaaaatacatagacagacggtttgtgcgggagcacccgatgtatatagattcccatctccttgcgccgctgatctccattgcgcctgagacggtagaactgtatacggacaaaccggagcatatgatgtccagaacgattcaaaacgtgtttcaggagagggtgcgcctttttccgctgggcgcatttgcagccgagaagacggaaggatagccgcacggacggccttgtgtaagcggcaaggctgtctttgcgaaatcagacggaaaaccgagttgcatttttctcacagacattttataatacataaaagattaatgattgctacacgtattgataaggacatgaagcattgataccggctttataagagaggagagcccaggctgaaagctttccagctatggatcattgtctttaccgcctttgaacttcagctgtgaacgccggaagaagcgccagtaatagctgacgggaactcccgttacagagtttagagccgcaggtgccgaaacaatcggccgcgcggaaaaaagggtggaaccacgattccgtttatttaacctcgtccctttcatagggggcggggtttttgatttgcataaaaaaaggagtgacgaagatgtcagatatgatcaacatcacatttccggacggagcggtaaaggaatttccgaaaggaacaacaacagaagatatcgcggcatccatcagtccgggattaaagaaaaagtctttagccggaaaactgaacggacaggaaattgatttaagaacgccgattcaagaggatggtgccgtagaaatcattacagaaggcacagaagaaggcttgaacatcatgcggcacagcacggcgcatttattggcccaggcgattaaacgcatttataaagatgtgaaattcggagtcggccccgtcattgaaaacgggttctattatgacgttgaaatggagcaggcgctgacgccggatgaccttccgaagattgaaaaagaaatgaaacgcatcgtcggtgaaaatctgccgattatccgaaaagaagtgagccgtgatgaagcaaaagccatgtttgcggaaatcggcgataatctgaagcttgaactgctggatgccatccctgaagacgaaacggtctccatttatgagcagggcgaattttttgacctgtgccgcggcgtgcacgtgccgtctacaggcaaaattaaagaatttaagctgctgagccttgcgggcgcatactggcgcggcgacagcaaaaaccaaatgcttcagcgcatttacggcacggccttctttaaaaaggatgacctgaaagagcatttgcggatgcttgaagaagcgaaagaacgtgaccaccgaaaactgggcaaagaattaaaattgttcgccaactctcaaaaagtcggacaaggcctgccgctctggctgccgaaaggcgcaaccatccgccgcgtgatcgagcgctacattgtggataaagagctgagcctcggttatgagcacgtctatacgcctgttctcggaagcaaagacctgtacgaaacatcagggcactgggatcattatcaggatacgatgttcccgccgatggaaatggacaatgaaacactcgtgctccgtccgatgaactgtcctcaccatatgatgatttacaaacaggacattcacagctaccgcgagcttccgatccgcatcgcagagctgggaacgatgcatcgttatgaaatgtccggggcgctttcaggtcttcagcgcgtacgcggcatgacgttaaatgacgcgcacattttcgtccgccctgaccagattaaagaagaattcatccgcacggtccgtttgattcaagacgtatacgaagacttcggcctgagtgattacacattccgcctgtcttaccgcgatcctgaagatacggaaaaatattttgatgatgatgagatgtggaacaaagcgcaatccatgctgaaggcggcaatggacgaaatcggccatgactactatgaagcggaaggcgaagcggcgttttacggccctaagcttgacgtacaggtgaaaacggcgatcggcaaagaagagacattgtcaactgtacagcttgacttccttcttccggaacgctttgatctcacttacgtcggagaagacggcaaacagcaccgccctgtcgttattcaccgcggtgtcgtgtcaacgatggagcgtttcgttgctttcttaatcgaagagcacaaaggcgcccttccgacatggcttgcgccggtgcagttccaagtcattcctgtatcaccgtccgtgcatcttgactatgcgaaaaaagtgcaggagcgcctgcagcgtgaaggcctgcgtgtcgagcttgacagccgggacgagaaaatcggctataaaatccgtgaagcgcaaatgcaaaaaatcccgtacatgcttgtggtcggtgaccaagaagcggaaaacggcgcggtaaacgtccggaaatacggcgagcagaaatcagaaaccgtctcattggacgattttgtgaaaaaggctgtagccgaagcgaaaaaataaccggaaatacaaaaaaccccgttcattcagaatggggttttttttgcgtataaaattatctttctttttgtttctctataatcgcaaacagctcgtgaagatcgctgatcacgtaatcaggcgcaatgtccgtatcatttttcttttgcgtccggtttacccagactgtcgtaatgcctgcccgtttcgctcccaatatatcagtattgaggttatctccgaccataatggcgtcttcttttttcaggttcaggaggccgaggcaatgttcgaatatggaggcgtcgggtttcccttttccgaaagcgcctgagatgacgatttcattaaaataaggcgcaagctcaggaacgccggcgagtttttctttctgcaggctgggatcgccgtttgtcagcagaagcaattcataaacacctttcagcttatcaagcaccgcaaacgtttcatcatacacgtacggacgctgtctgcgttccgccgcgaaaaactccgccaaatattcgccgtaagccgcatcgtctataccgacgctttttaagccgttcgtccaggcgtttcgtctgtattccggcgcaatccgattcagctgtttaaatccttcgctgaccggctcggaaaaattcgcccacaatccttcaaacggattaatgccgatcatgaccgtataaggataggtttcgtatgacatatacaattcccgtgccgccttccgaaccgcatcttcaaatgtatgcgggtcaaggccatattttttttccgcttgtaaacatgtttccctgaatgttgttctgacgcttttttcatcccataacagtgtatcgtccaaatcaaaaaatacggctttcatgatcttctcctctttgttatattctgaaactctctgccgcaaggctcccgtttattctacaatagatatatagactgtgaaagatttgttttcagatgatttgaaaaaaacaggcaggtttgtgtcagattctgtctcaggctctaaaacgtgataaaattaaatttgaaagaacaggtgaaaagtatgctgcatttgatcatcatgatgctggaaagagtcggaattatcgtcatattgggatttgttctggctcataccagattgttcagacaggcgctccagcagcctgagagctataaaggcaaagcggtgctgatttcaattttctcgctgttcagtatcatcagcaactatacgggaatagaaattcagcggaatacaatcatgaataatgactgggtgtttcaaattaatccgtccggttcaattgccaatacaagaattatgggcgttgaaatcggcggactcttaggcggcccgtatgtggggatcggcgtcggcatactggccggcctgcatcgtttatcactcggcggcgcgaccgcagtcagctgtgccgtctcatccgttttagcgggcattttgtccggctggatcggacggtatttcagaaaacgctatgcgatgccgacaccgcgggtggccgcgcttgtcggactcggaatggaatcgctgcaaatgctgctcatcctcttgatggccaagccgttttctgatgcttggacgcttgtgagcatcatcggcatcccgatgatattggtaaacgggtcagggacttttatttttctttcgatcattcagtcgattatccggaaggaagaacgggcgagagcccttgaaacccatagggtgctgatgattgccgatcagacgcttccgtttttccgccaggggctgaatgaaagctcatgcaaaagcgtcgccgccatcattcacaggcaaacaggaacggacgcggtatcgcttacggataacgaaaagattttggcgcacgtcggcgcgggtgccgaccatcatattccgtctgaaagcctgatcaccggattgtcaaaacgcgtcattaaaacgggtcatattatgaaagcgacatcaaaggaagaaattgaatgcacgcacgatccctgtccgctgcatgcggcgatcgtattgccgctgacgtcaaacggcaaaacgatcgggacgctgaaaatgtactttaaaagcccgtcaggtttaagccgggttgaagaagagcttgcagaaggactcgccatgctgttttccacccagcttgaactcggcgaggcggaactgcagagcaaattgctgaaagacgcagaaataaaggcgcttcaggcacaggtcaatccgcattttctgtttaatgcgatcaatacgatttctgctctttgccgtacggatgtggaaaaaacccgaaagcttctgctgcagctcagcgtctatttccgttccaatctgcagggggcaaggcagctgctcatcccgctttctaaagaactgaaccatctgcaggcgtatttatcattggagcaggcccgttttcccgggaaatataaaatcagtcttgaaatcgaacgcggtttggaggacatcgaaattcctccttttgtgctgcagattctcgtcgaaaatgcgctccgccatgcattttcaagaaagcaggacagctgtgccgtcaatgtcagcgtggtatcctccggtcagtcggttttaatgcgggttggagataacgggcggggaattgatccggaattgctgtccgtgctcggaaaccatccgctgccgtctaaagaagggacgggaaccgcgctttacaatttaaatcagcggctgatcgggctgttcggccccaaagcagccctgcgattggaaagtgaggccggcaaaggtacggacgtatcatttgagctgcctttgaaactgatgactaaaggagaagaacatgctgaaggtgttaatcgttgatgatgaaatgctggcaagagatgaattagcttatttgctgaaacggacgaatgaagtaagtgacataaacgaagctgaaaatattgaatccgcttttgacagtatgatggatcaaaaaccggatctgctgtttttggacgttgatttgtcaggagaaaacggatttgacattgccaaacggctgaaaaacatgaaaaatccgccggccgtcgtttttgcgacggcgtatgaccaatttgctttaaaagcctttgaagtcgacgcgctcgattatttaacgaagccttttgatgaagaaagagtgcgccagacgatcagaaagtttaaaagagtgaagcgggacagggcaggagccgtctcagagcagccgtccgcagccggagcgcataaactggctgtatcagccggtgaatctattgtcattttagatacgaaggacattattttcgccggcatggaggacggacacgtttccgttaaaacgtttgccgcgtcttattccgttcacgaaactttggcggtcattgagaaaaaactgcctgatacgggtttcttgagagtgcaccgcgcgttcatcgtgaatacggagcatattacagaaattcatccgtggtttaattcgacgtacaatcttatcttaaaagacggctctaaaattcccgtcagccgtacatacgccaaggacttaaaaaagctgcttcatattatatgaggcggcttttgcatttcagcagccgttttttgcatttcagaatgaatattcagccgtttgttatgaaagcgctttaaaaggcgatttctcttttataatggacctaacaaagagaaagaggtgaagaaaatgagtgcgaaaaaagtgtacggatttctgacacaagcatttatttttgccgtaattatgctcatatctaatgggattgcagcgattgtccccattcctatacccgcttccgtagtaggtttggtgttattatttgtcctcttatgcctgaaagtgattaagcttgaacaagtagaaacgctgggaacatcattaacgtcactgatcggatttttatttgtcccgtcgggcatctccgtgatgaattcacttggcgtcatgcagcagtacggcgtgcagatcgcactcgtcattttactcgccaccatcattctgttaggggcgacgggccttttttctcagctgatcttgtctgtcagccaaaaacgtcagaaggcagcccctgaaaaacaaacggtgcgccgttccaatcaggaaaaagaacttgtgcagcattaggagggaaatcggatgagtccatatttcggtattgtcgtttcacttgcggcctttggcatcggcacgtatttatttaaaaaaacgagaggctttttcctcttcaccccgctgtttgtcgcgatggtgcttggaatcctttttctgaagctcggcggtttttcatatgaagattataaaagcgggggagacattattaaattcttcctggagcccgcgacgatcgcttttgccatccctttatacaaacagcgtgacaaactgaaaaaatactggtggcagatcatgtcttctatcattgtcggctctatctgctcagtcacgattgtctatttgatcgcaaaaggcattcatcttgacgcggccgttatgaaaagcatgcttccgcaggcggcgacaacggcaattgcccttccgctgtcaaaaggaatcggcggcatcaccgacatcaccgctttcgccgttattttcaacgccgttatcgtctatgctctgggcgctctattcttaaaactctttaaagtgaaacacccgatctctaagggactggctctcggcacatccggacacgcactcggtgttgcggtcggtattgagatgggagaagtagaagcggcaatggcaagtatcgcggttgtcgtcgtaggagtggtgacggtgctggtcattccggtattcgttcagctcatcggaggataaacccgggtcatagacccgggtttttttattgtgttggcacgtccgcgggcggcaaagaatgaaatttcacatttttccttgcgctcgacccggcatcgtgttaaaatgaaaaagttgatccggagaagtcattcttgactaatgatccggtattgtgtagaatagttattgaattgaatataaatcacaagcagaggcacccgcttctcacctgattgacacattcatgtagttggcaggttgaccgtacatttttatttatgcagatgttcgtagtgtgggtgtgttgtcatgcccgcactttttgtttgcctgcagaatgcagtcaacaagcgttgtgaatcaattcgaagaaactatggaggtggctcattattagcaaagatcaattggttaatgagggtatccgtgcacgtgaagttcgtctgatcggacaaaatggcgatcagctcggcatcaagtcccgtcaggaagcacttgaaatcgccggccgcgcaaatcttgaccttgtgttagttgcagcaaatgcaaaaccgcctgtctgccgcatcatggactacggtaagttcagattcgagcagcagaaaaaggacaaagaagcacgcaaaaatcaaaaaatcattaacttaaaagaagttagattaagtccgacgatcgatgagcatgactttaacacgaaattgcgcaatgcgattaaattccttgaaaaaggcgataaagtgaaagcttctatccgctttaaagggcgcgcaatcactcataaagaaatcggccagcgcgtattggaccgtttctctgaagcatgtgcggaagttgcgacagtcgaaacaaaaccaaaaatggacggccgcagcatgttcttaatgcttgcgccgaaaaacgaaaagcaataaggaggaaatcccatgccaaaaatgaaaactcaccgcggatctgctaaacgttttaaaaagacaggttctgggaagttaaaacgttctcatgcatatacaagtcacttattcgccaacaaatcccaaaagcaaaagcgtaagcttcgcaagggtgctattgtgagcgcaggagacttcaaacgcatcaaacaacagcttgccaacatcaagtaatcggacaaggaacaattaggagggaaatataatgccaagagtaaaaggcggaactgtgtcgcgtcagcgtcgtaaaaaggttcttaaattagcaaaaggttatttcggttcaaaacatagattatacaaagtagcaaaccagcaggtcatgaaatcaggaaactatgcattccgtgaccgccgtcagaaaaaacgtgatttccgtaagctttggatcactcgtatcaacgctgctgcacgtatgaacggtctttcttacagccgtttaatgcacggtcttaagctttcaggcatcgaagtaaaccgcaaaatgcttgctgatcttgctgtaaacgatcttactgctttcaatcagcttgctgatgctgctaaagctcagttagacaagtaagttgaaaaagccgctctctttccgggagcggtttttttacgtaaagggtgacaatcaatggctctcctcatttacgccgtgttgataaacggatacggcttttggatcatgggcgctgataaaagaagagcaaaggcgcacaggtggagaatatcagagaaacggatatggctcacagccgccatgttcggctcactcggcgtatggatcggcatgcgcaccttcaggcataagacgaaacacaaatcctttttatacggggtgccgctgctttttctcactgaagccgcccttgtgctgatgtatttggtgtataaagaataaaaagcaggagagcttatcgctcgcctgcttttttcgcttttttgatgggctggtcccaatcaatcttgcaattcgggtaccgctccaatacctttttttcgacttcttcaaaatcacctgcagaaaagcggttcagcttttccggattttcggtccatacaaatatcgtatgaataaacagcggatgatctttggaagggatatgcttttctccttcaaagagcactcctttataagtaagctggagattttttcgcgtgtttttctgttcgtcaataaaataaaaattctcttttgattgcgccagtctgagccttcttttcgggtttgcgtagaatttgacgcccatgtaaataaaataaataagaagtgcaagcaagacaatcctcaatactgtaatggccatatgtgtgaaggcacctcctcacctttgtcatgatctgatgtaatacgaaaaacaaaacaaaaggtttcatttttttaaaagaaatagataaaaacatttacccgtttttcaggcgaattaatcgtatgcttcagcattggttttgtataataagaagggtagtgaaaaaaaggaggtttattgatgacaaaattagatgaaacgctcaccatgctgaaagcgttaacggatgcaaaagggataccgggaaatgagagagaagtaagacaagtgatgaaatcatacatagaaccatttgctgatgatgtcacaacagaccggctgggaagcttaatcgccaaaaaaaccggcaaagaaaacggtccgaaaatcatgatctcagggcatttagacgaagtcggttttatggtgacgcaaatcactgataaaggctttctccgctttcaaaccgtcggcggctggtggtctcaggtcatgctggcccagcgcgttaccgtcgtgacaaaaaaaggggacatcacggggatcatcggttcgaaaccgcctcacattctgcctcctgacgccagaaaaaaagccgccgatattaaagagatgttcatcgatatcggggcgtccagccgtgaagaagcaatggaatggggcgttcttccgggtgaccagattgtgccgtattttgaatttacagtgatgaacaatgaaaagcatttattggcaaaagcatgggacaaccgtatcggctgcgcgattgccatcgatgtattaaaaaatctgaaaaacagcgatcatccgaatgaagtatacggggtcggaacggttcaggaagaagtcgggcttcgcggggcgaaaacagcggcacatacgattcagcctgatatcgcgttcggtgtggatgtcggaattgccggagatacaccgggaatttctgaaaaagaggcacaaagcaaaatcggcgaagggccgcaaattattctgtatgacgcgtcaatggtatctcacaaagggctgcgcgaccttgtcgtgaacacggcggaagaagcgggaattccttatcaattcgattccattgccggagggggcacggattcaggttccattcatttaaccgcaaacggagtgccggcgctgtccattacgatcgcgacgcgctacattcacactcatgccgctattttgcatcgggatgattatgagaatacggtaaaattgatcacagaagtgattaaaaaattagaccgggaaacggttgaccgtattacttatcaataaagatacggaagaatctgcttttttaagcagattcttttttttttgtctgtacaaatatgaaccctgcgtctacaataagagaagacatagaaaaatctgacaacatgtttttgaaagcgctttaaaaaagggagggtttacaaatgaaaaacagattcagacgcatgatccgcttttcatgcgcagccgttacagccggtctgctgctgatgtcttcatctccggcatctgccgcgttttggggggcatcaaatgaattgctgcacgatccgacaatggcgaaggaaggaaacacgtggtacgctttcggaaccggtttggaaggggagagggggcttcgcgtcttaaaggcgggcagcggcggcgtatggaccgttcagaaatcaatctttacttccccgctgtcatggtggggcaattatgtgccgaattacgggctgaatcaatgggcccccgatgttcaatattttaacggaaagtattggctgtattatgccgtttcttcattcggcaaaaatacctccgcgatcggtcttgcatcatctacaagcctcagttcgggaaactggaaggacgaagggctcgtcatccgttcaacaagcgccgataactacaatgcaattgatccggagctgacaattgataaagacggaaacccttggcttgccttcggttctttttggagcggcattaagctgacaaagcttgataaaaatacaatgaaaccgacgggatcactttattccatcgctgccagaccgaataacggcggagctttggaagcgccggccatcacctatcagaacggctactattacttaatggtgtcgtttgataaatgctgttcaggcgtgaatagtacgtacaaaatcgcttatggaagatccaaaagcatcaccggcccatatctcgataaaagcgggaaaagcatgtcagaaggcggaggaacgattcttgactccggcaatgaccgctggaaaggcccgggcggccaagacattgtgaacgggaatattttagtgcgtcatgcgtatgatgccgaaaacagcggaattccgaagatgctcatcaatgatattgattggagttcaggctggccttcctattaattgatcagccgggcatgtgtgtccggcttttttacttgcaataaaagattgacagtttgattcctccttaactataataaaattgttcgtacaaataaaaggataaaagttttatattttatattcgtacgtatatttttaaaaatgcaagcgctttattttgatgggaaggggaaatgaatgtgcttcagaacaaagaatatgaattttggtttgtaacgggaagccagcacttatacggagaggaaacgctgcagcttgtcgataaacacgcaaaggggatatgtgacggcctcagcggggtgtcatcaagatacaagatcaggcataaaccggttgtcacgtcatctgaaacgatcagagaggttttgcgggaagcgcagtatcaagaaaactgtgccggggtcgtgacgtggatgcatacattttcccctgcgaaaatgtggattgaaggtctttccgcttttcaaaagccgatgcttcatctgcatacccaatatcatcgcgacatcccgtgggaaacgattgatatggactttatgaacagcaaccaatccgctcacggagaccgggaatacgggtatatccagtcaagaatggggcagacgagaaaagtcatcgcaggctattgggatgatgaggaagtcaaacatgacatttcgcaatggatgaacactgctgccgcctggaatgaaagcaggaatattaaagtagcccggttcggcgacaatatgcggaatgtagcggttactgacggagacaaagtcggcgcccacatccaattcggctggcaggttgacgggtacggaatcggcgatcttaccgaggtgatgaacaacgtcaccgacgcagaaattgaggcgctttatgaggaatacgacaaattgtatgtcatcagcggcgaaacaaaacaagatgaagcaaaagttgcttccattaaagaacaggcgaaaattgaactcggattaacggcctttctcgaacggggcggatatacagcgttttcgacctcctttgaagttttgcacggaatgaagcagcttccgggacttgccgttcagcgtctcatggaaaaagggtacggatttgccggcgaaggcgattggaaaacggctgcccttgtgcgaatgatgaaaataatggcggacggagaacaaacctccttcatggaagattatacgtaccattttgaaccggggcgtgcgatgattctcggatcacatatgcttgaagtatgtccgacgatcgcccttgatcagccgaaaatcgaagtccatcctctctcaatcggagggaaggaagatccggcccggttggtctttaacggaatcggcggttcagccatcatcgccagcatcattgatatcggcgggcgattccgtctcattctgaatgaagcagaaggtagggaaattgatcatgatatgccgaatctccctgtggcgcgggtgctatggaagccggagccatcgctgaaaacagctgcggaagcatggattttggcgggaggcgcccatcatacttgtatgtctttccggcttacggctgaacagatgcttgactgggctgagatggcaggcattgaaagcatctttatttcccgcaataccgaaatacatgagctgaaaaaagagctgaaatggaatgacgtattataccggttgggagggaattgatatggcgtatacgattggtgttgatttcggcacattgtccggccgggcggtgcttgtcaatgtccgcacgggcgaagagatcgcgtctgcggtaaaagaatacactcatgccgtcatcgaccgcacgctgccgaagacgggtgaaaaactccctcgggactgggcgcttcagcatcctgccgattatatcgaagttctggaaacggcgattccgaacctgcttcaagaggcgggcgctgatccaaaagacgtgatcggcataggaattgattttaccgcctgcacgattttgccgatagacgtcgcggggcagccgctttgtatgctgccggaatttgaacgggagccccacagttatgtgaagctgtggaagcatcatgcggctcaaaaacatgcagaccgtttgaacacgattgccgaagacacaaaagaaacattccttaaaagatacggcggtaaaatttcttctgaatggatgatcccgaaaatcatgcaaatcgcggaagaagcgccgcatatatacaaggcggcagatcggattgtggaagcggcagactggatcgtctatcaattgtgcggttcattgaagcgaagcaactgcacggccggctacaaagcaatctggaatgaggagacggggtatccgccggatcatttttttgaaaagctcaacccgttaatgaaaacgattacaaaagataaattaagcggcaccatttattcagtcggggaaaaggcaggaggtttgaccgaaaaaatggcggagctgaccgggcttctgccggggacggccgttgccgtcgccaatgtcgacgcccacgtgtcagtgcccgcggtcggtattacagagccggggaaaatgctgatgattatgggaacgtctacctgccatgtgctgctcggcgaagaagaacatatcgtccccggtatgtgcggggtcgtcaataacggcatcttgcccggatatgcgggatatgaagcgggacagtcctgtgtcggcgaccactttgaatggttcgtcaaaacgtgcgttccgagagactatgagaaggaagctgaggataaacacatagacattcacgagctgctcagcaaaaaagcagctgtacttgttccgggggaaagcggccttctcgcgcttgactggtggaacggaaaccggtcaaccttggtggacgccgatttgacgggcatgatgctcggcatgacgctgcacacgaagccggaagaaatctacagggcattgattgaagcgacggcgttcggaacgaggatgattatcgaaacgtttcgggaaaacggcgttccggtcgaggagctttacgcagccggaggaatcgccgaaaaaaatccgtttgtcatgcagatttatgcagacgtcacaaatatggatattaaattatccggttctccgcaggcgcctgcactgggctccgcgattttcggagcgctcgccgcgggacgggaaaacgggggattctccaatattgctgaagcatgtgcgcatatggggaaattaaaagacggcttttatgccccgaaccgggaaagagctgagatttatgacagcttatatgcggaatataaagagctcgttcactacttcggcaaagaaaacaatgtcatgaaacgcctgaaagccattaaaaaccgtgattttgcgaaaggggggagccgccatgcttgaagcgttaaaagaagaagtgctcgccgccaatctgaagcttgaggaacataaccttgtcacgtttacatgggggaatgtcagcggcattgacagagagagcgggagaatcgtcattaaaccgagcggtgtcgattacagtgagctgaccgctgacaaactggtcgtcctgaatgaggacggagacattctcgaaggctcgctgaaaccgtcttctgacacgccgacccatctttatctgtataaagcgtttccggctatcggcggaatcgttcatacgcactcccgctgggcgacgagctgggcgcagtccggaagagacatacccgctctcggaacgactcacgcggattactttgaaagcgctataccctgcacgagggaaatgtatgaagaagaaattgtgaaagattacgaatatcatacaggcaaagtcatagccgaaacttttcaaaacgaaccgtatgaacaaaatccgggtgtcctcgtccacagccacggcccgttctgctggggaacggacgcgctgaatgccctgcataacgccgttgtgctcgaaacggtagcggaaatggcctaccattcgcttatgctgaacaaacagctcagtccgatcgacagagtgctgcatgataagcatttttacagaaaacacggggcgaatgcttattatggccaaacttgacgcagccgggtttctgattgatttagacggaaccgtattcagggggcgggagctgattgacggcgcaaaagaagccgttcatacccttcagtcactgggcaaagccgttgtctttttaagcaaccgcggcaatctatcaagagcaatgtgccgaaagaaactgctgggtgccggtatccgcacggatgaacggagcatcgtgctgtcctccagtgtgacggcatcatttttaaagaagcattatcctttgtcaaaggtgtgggtgttaggagagaaagggctgactgatgaactcgctttagcgggtgtcgccctggcgcaaaacccgcaggcggcagactggcttgtcatctccctgcatgaaaccgtcacctatgaggatttgaatctcgcttttaaggcggcttcctccagcgcgcgcatcatcgccacgaaccgggaccgctcctttccgaatgaaggcggccatgccatggatgtcgcgggaatgatcggggccattgaagcatccgccggagcaaaaacggagcttgtcatcggcaaaccgtcttggctgatggctgaggcggcatgtgaagcgctcggacttccccctgaggaatgcgccattatcggagacagcctcgaatctgatattgcaatgggcagcctgtacgggatgaaaagcgtattggttctgacggggtcggccaaacttggggagccccgtctatatgaacctgacatcgtccttgattctattaaagacctgacagaattagcgaaggagggaatccttttatgaaacgttctcctgaggacattcaatccgagtttgacaaggaaggggccagccgctcaccgattcaaatagaagatatcgtgatcggggcgaatgcaaaagaagagcttctcagatttctgcaaaaaaaatgctggaatcatccggtcatcgtctgtgaccggaacacgtacgaggcggcggggcgtctgcttgcggacgaattgagggcaggcgggatcaaagcgtcaaaagtcatcattccggagcatgaagccggggccgccgcggctgatgagaggacattggtctatacgctgatcaatctcgcggaagagacggatgtcatcattgcggccggttcaggaacgattcacgacattacgcggtttgccgcctgccagcgcggattgccgtttatctcattccccaccgctccgtcagtcgacggttttacgtcggcgggagcgccgctcatattaaacggtatcaaaacgacgattcaaacgaaagcgccaattgccttatttgcggatacgaatgtattaaaagaagcgccccgttcaatgacagccgcgggcttcggagacatgctcggaaaaataacatcgctggcagattgggagatttcccgcaggcttgcgggtgagccgtactcagaagccggggcgaagcttgtgaaagacgcgctttggcagtgcattgatcaccgcgctgccattgccatgggaacggaggccggcattcagatactgatggaagcgctgatcgtttcgggtcttgtcatgcttgcgcttgaccactcccgccccgcctcaggaggagaacatcacatctcgcattggattgagatggaaatgctgaaggcaaaacagcctccgattctccacggtgcgaaggtcggttgtgcgtgcgcggtgctgagtgatacttacaaagaactggcttgtcacgaaaagcttgctgaactgccgccgcactttcgcgaggcgattcaatctgcatatgaagggcttcctgacggcaagacaattgccgggtggctcgcatctgcgggaggtcccgcctgtttcgatgagatcggtgtaaaacaggaccttgtcagcgatgcgcttaagcatgcgcacacactgagagaccgttataccggtttaaccatcataaatgaaaatgcagcgctctttgcacatcatttgcatcaatagccgcacggcctaaagtggaaggggtaatgacatgaaaaaaacgaccgctgtatgtttggtgctgatgatgctcttcttgtttaccgccggctgttcacaagaacggactgccggccggccgggagaaacggagctgacgttttggacgtttaacggtctgcacgaacagttttatcaggaaatggtcaaagaatggaatcagaaatatccggatcgcaaaatcaagctgaataccgttgtttatccttatggacaaatgcatgataatttatcggtttcgctgatcgcgggtgaggggcttcccgatatagccgacgtggaattaagccggttctcgaactttctgaaggggaaggatatcccgcttgccgatctgacgccgctgattgaaaaagaccgcgataagtttgtggaagcgcgtctggccttatacagcaaaaacggaaaattgtacggccttgatacacatgtggggacgaccgtcatgttttacaacatggatatcatgaaaaaagcgggcgttgatcccgcctccattaagacatgggaagattaccggcgggcagggaaaaaagtgcgtgaagccgctgggaaaccgatgggaacggttgaaacaaacgactccgccacattcctatccatgatttcgcagcaagggtcaggctactacagcaaaaacggaaaattgattctgaacagcaagacgaatacagacacactgaattatgtaaaggacatggtaaatgataaaacccttctgccggctcccggcggcggccatcacagcgaagaatactacggttttatgaatcaaggcggggcagcctcagtgctgatgcccatttggtacatgggacggtttatcgattatatgcctgatttaaaaggaaaaatggcgatttaccctatgccggcctggaaagaaggcggtgacagatcagcgggtttaggcggaacagccaccgtcgtgccgaagcaggctgaacatctgaagctcgcgaaagaatttctcggttttgcgaaaggttcgaaggaagggaatataaagctttggacggtgctcggctttgacccgctccgctgggacgtgtgggattcaaaagaattgaaggagaaaaacaagtacacggatttcttccggaacggtacgtcaattttttcctcgctccttgaaataaaagatgagatcaatccgatttatctgcatgaagacttctctaaagcggctgatctcgttgtcagacaagtgctgttcgatgcgctgaagacgcaggaaaaaacacctaaggaagccttggacgaggcggcagagcaattagagaaataggagaagccgccctatttaacagtgaaagcgggggagcttttatgagacctgtaaagacagagacagcgcaaaccgtttctgcagtccggaagaagccgcgccggcgcaatgtgctgtattcaaaaaaagcggcgccttatctttttacggcgccatttatcatttcgtttctcgttttctttttgtatccgattatcagcgtgtttatcatgagctttcaacggatactgccgggagaaattacatttgtcgggttttccaattataccgctcttcttaatccaaccttttatacggcattatttaacacattggaatataccttctggacgctgatcgtgctgattccggtgccgcttcttttggcggtgattctgaattcgaagctcgtcaggttcagaaatgtgtttaaatcggctctgtttgtaccggctttaacatcgacgatcgtagcggggattattttccgtctgatgttcggagaaatgaatacgtcgcttgcaaacgagcttatgatgaagcttggcgcatcaccccaaaactggctcaacaacaaaggtaccggcatgtttttaatggtgctgcttgcgtcatggaggtggatggggattaacattctttactttctggcgggattgcaaaacgtgccgaaagaattgtatgaagcggctgaaattgacggggcgagtacgtggaaaaagttccggcatattacccttccatttttaaagccggtgtccgtttatgtgttaacgatcagtattatcggcggtttcagaatgtttgaggaaagctatgtgctttggcagaataattccccgggcaatatcggcctcacgcttgtcggttatttatatcagcaggggcttgcatacaacgaaatggggtacggggccgcaatcggaattgtccttttgcttgtcatcttactagtcagtcttgtttcactgaaactgtccggttcgtttaaaggggagggataagcgttgcgtaacaatcacatgtcttccgtgtacagagttgcgtttaccttgttttttatcatgctgagcctgttgtatatctttccgatgatctgtctattgctcggttctttaaagccgtcatctgagctgatgcgtatcgggctgaatctgcgccttgatccggatgtgatgagccttgataactacacctatttgttcaacggggggagcatttatttcaaatggttttttaacagcctgctgctcggcgttctcaccacggttctcacgctgtttttttcctctttgatcggctacggactcggtgtctacgaatttaaaggcagaaatattattttcgttcttgtgctgatcattatgatggtgcctcttgaagtgatgatgctcccgttgttcaaattgacggtgggtcttcatttgatcgattcttatactggggtgattctgccgtttattgtgtcgcctgtcgccgtgttctttttccggcaatatgcgctcggacttccgaaggatctgcttgattcagcgagaatggacggctgcaccgaattcggcatttttttcagaattatggcgccgctcatgaaaccggcattcggggcaatgatcattcttcaatctttaaacagctggaataactttttatggccgctgatcgtgcttcggtcgaaagaaatgtttacgcttccaatcggactttcagggctgctgagtccgtacggcaacaactatgacatgctgatttccgggtccgtttttgcgatactgccggtgatcatcatattcttgtttttccaaaaatacttcatttccggactcacagtaggcggagtgaagggatagagagagggaggaaatataatgaaaaaagcggggattacagcagataaagaatatatcatcggtgaagtggacaaacggatgtacggatcatttatagaacatatgggccgggcggtgtatgaaggcatttatgagcccggacacccgaaagccgacaaggacggcttcagaacagacgtgcaggagttaatcaaggaattgcaagtgccgttcatccgctatccgggagggaattttctctcgggctacaattgggaagacggcgtcgggccggtgaaggaccgcccgcggaggcttgatttggcatggcagacgacagaaacgaacgaagtagggacgaatgaatttttaacgtgggcgaaaaaagtgaacgccgaagtgaatatggcggtcaatctcgggacgagagggatcgatgccgcccggaacctcgtcgaatactgcaaccatcctgaagggtcatactggagcgacttacgaaaatcgcacggatatgaaaaaccttacggcatcaaaacatggtgcttaggaaatgagatggacggcccttggcagatcggtcataaaacggcgcatgaatacggacggctcgccgctgaaacggcaaaggtgatgaaatggacggacccgacgatcgaattggtggcttgcggaagctcaaacagcggcatgccgtccttcatcgagtgggaggccgaggtgcttgagcatacgtacgagcatgtggattacatctcactgcatacgtattacggcaaccatgaaaatgatcttgaaaactatttggcgaagtcgatggatttagaccattttattaaatccgtcacagccgtatgtgattatatgaaagcgaaaaaacgcagcaaaaaaacgattcacctttctttagatgaatggaatgtgtggtatcactcaaatgaagcggataaaaaagtggagccatggattacggcccggccgattctcgaagacatctacaattttgaagatgcactgttgatcggttcactgctgattacgatgctgcagcatgcggacagacttaagatcgcctgtctcgcccagcttgtcaacgtgattgcgcctatcatgaccgaaaagggcggagaagcatggaggcagccgatcttttacccttacatgcacgcctctgtctacgggagagggacttcaatgaagctgctggtcacctccccgaaatacgactcagcggattttacggatgtgccgtatgttgatgccgcggccgtttaccatgaagaggatgaagcacttaccatttttgccgtcaacaaaagcaaggaactgatggaaacggagatcaaactgagggggtttgaagattaccgcatcattgagcatatcgtgctggagcatcaggatatgaaagcgaccaatcaaaaaaacagaaaagaagtcacgcctcactcaaacggaacgtcttcggcaaatgctgaagggataacggctcattttactccgctgtcctggaatgtcatccgtttatcaggcaaataatgttccgaaaagccgggctgcgccgccggcttttttttacgcaaaaatcatctcccgttatctgataattgtgataatatttagaaaaagagaaaaggggctgggattaaatgaatgcgattacaatcgtcatagcgtctatatgtattctggcgatcgcctatcggctttacggtacctttatgatggtcaaagtattaaaaatcaatgatcagacaccgactccggcccatgtgcttgaggatgggaaagattatgtgccgacgaataagtgggtgtcattcggccaccacttcgcggcaatcgccgctgccggcccgcttgtcggaccgattctggcagctcagttcggctatctgcccgggcttttatggctgttaatcggggcggtgatcggaggagccgtgcacgatattgtcgtattgtttgcatcaatgcggaaaaacgggaaaacgctttctgaagtcgccaaagaagagctcggcccggtggcgggtttttgcacgggtctctcgatgctgtttatcattacgatcacgatggcggggctgtccatggttgtgctgcacgcgcttgagaaaaacccgtggggaacgtttgcggtgggcattacgattccgatcgcgatgggggtcggcctctactataaaaaaacgggcaatctcaaactcgcatcaactgtcgggtttcttttgttaatggccggtgttgtcatcgggccgcggctgcagacaacggctctcggggacatgctgacactggatgcgaaaacgcttgcagtggcgcttcctgtctatgcgtttttcgccgcggcgcttccggtttggcttttgctggctccgcgtgactatttaagcagttttatgaaaatcggggtttttgccgctttgatcgcaggcgtctttttcgtcaatcccgccattaaatttccggccgtaacggagtttattcacggcgaagggccggtgatcgcgggtcctgtctggccgtttatttcaataacgattgcctgcggcgccatttcgggttttcatgcatttgtcggttccggcacaacaccgaaaatgctggataaatggagtgatataaagccggttgctttcggagcgatgcttgtggaatgtctcgtcggaattatggcgctcattgcagctgccgctcttgagcccgccgactattttgctattaacagcacgcctgaaatattccgcaccctcgggatgaatgtcgtccatctgcctgaattgagtaaagaaatcgggctcagtctggaaggaagaacgggcggcgctgttacgcttgccgtcggaatgacgtatatctttacggagattccgtttttcagtcatttggcttcatacttttttcaattcgtcattatgtttgaagcggtgtttattttaacggcgattgatgcgggaacccgtgtcgcccggtacttgattcaagagtttttcggagaggtctataagccgctgaaaaaaacagactggctgccgggctcgattttctcaagcgcgctcgcctgcctgctgtggggctatcttctgtattcgggcgacatcagctccatttgggcgctgttcggcgtatccaatcagcttatggcgtctgtcggcttaattatcggtgcgaccgtcgtattaaaaatagcggataagcggcgctatatgctgacatgcctgattcctctcgcttatttgtacgtgaccgtcaactatgcgggttattggatggtgcggtatgtgtatttgaaccccgaagcggcgggatacaacgtgctgaatggcgttttatccattatcatgctcattctcgggcttgtgattatcattgcggctgtgaaaaaatgggcgaatgtatggcgtgatccgagtgccagactagaagcttcaatacccggataaatccgcggccgtccgaacattgcagcatcataaaaaagcagagagccgatatgtctctctgctttcatcttatgacaaatccgccgcttccaaaaggtaatccgccaaatgaaccgcgcggacacggcctgttaatccttcgcgtaaaatgccgagctgcatttgcagaaggcatccgggattggctgtcacgatgacggccgcctccgtttttccggcggctttcatcttactgtctaatattttcatagacatctctgactctgttatattataaattcccgccgacccgcagcagctgtcggccttttccatttctctgtactcagcccctttaatgcttttcaaaagcgtgcgcggttcctctgacgtatgcatcacattgcggagatggcaggagtcctgatatgtgacgatatgaggagactgcgcccgcaggtttttttgatggaacttcagatcaaccagtacggatgaaaagtctttgagcttccggacgaattgttcggcacgttccgcccatccaggttcatctttcagtaaatgcggatattcctgaagaaaggcgccgcatccgccggcgtttgtaatgatataatcagcgtcaagcgcctcaaaagccgcgatattccgcttggccagttcttttcccatctctttttctccgctgtgcccgtgaagcgcgccgcagcacgcctggccgtccggaaccgcgatttcacacccggtcgcctgtaaaagcgccgttgtcgcatgatttgtcgctaaaaacatcgtatccattaagcagcccgagaaaaaagcggcccgtttttggacgggacccgcggcaggaagaaaacgcggcctttccttcatgtctttccgtttcggggcgggcgggagcacttgttccattgtgcgcagatgttcaggcaaaacgcgcagcataccggtttttctgacggcggtctgcagtcctgatctttggtatattccgagaagattcacggctgtctgcatgcggttttgatgagggaaaagcccggtgaaggcggctttccgcaagaggcgcacgcccggcttatgttttttattttgatgaatgatatccctcgcttcttcaagcagctgtccgtaattgacccctgccggacaaacgggctcgcatgcccggcatccgagacacagcgaaagtgagcgctcgacatcttcatccggctcgatcagtccgtcagtgacggctttcatcagggcgatccggccgcgcggcgaatgggattcttgaaatcccgattcaatataggtcggacaggaaggaaggcagaagccgcagcgcatacagttcagcaattcaccttcatccatgcgggttttgaattctgtttgaatttgttgctgctctttagccgttgtcatttcatcaccaccacgcgtttccttgatgaattggcgaatatttttcccggattcagcagattttggggatcaagcgcttgtttgatcgctttcatggcggtgatgccttctgttttcagtttcatttctaaatacggcgcttttacgatgccgaccccgtgttcacccgttatcgtcccgcccagctcaatcgctttttcaaaaatggcggcaaaagctttttcgacacgttccatttcctctgtatttcggatatcggtggtgcacgtcggatggaggttgccgtctccggcatggccgaatgtgcagatggacaggccgtatgtttctgcaatctcgttaatggctttgaccatgctcgcaatttgtgatctcggcacggtcgcatcttccagaatcgttgtcggtttcagccgggcaagggctgataatgcggaccgtctggcctctgtaagcgcgaatgcctcttcctcggtttcagccgtttggacggatacggcggctccgtttttacaaatcgcttcgattttttccatatctcgtctgaccgtgtcgatgtcaccgtcctgttcgatcagcagcaccgcttttgcgtcggtcggaagcccgatcttggcgtaatcttcaatgacctgcagtgtcggctgatccagaaattcgagtgtcgccggaatgattttttcagcgatgatggcagaaaccgattccgcagccgcttcaatatgttcatagagtgcaagcagcgtttttttcgtttccggcttcggaaccagctttaaagtcgcttccgtcacaacgccgagcgtcccttctgatccgacgaaaagccgggtcagatcataaccggcgacatcctttgtcagctttcctcctgtgcggatgatatcgcctgaagccaatacggcttcaaggccgaggacataatcccgggtgacgccgtacttcaaaccgcgcagcccgccggaattttcattaatattcccgccgattgtcgatattttcatgctgctcggatcaggcggataaaataaacctttttgttcaaccgcacggatcatatcttgcgtaatcacgcccggctggacggttgccgtcaaattttcttcatcgatttctagaatgcggttcatatgtttgaataaaagcacaagcccgccttcagacggacatgtgccgccgcataggtttgtgcctgaacccctcggcacgatcggaatgtcatgcctgctgcaaatcgttaatatacgggacacgtcatccgcgctgcggggggcgatgaccgcatccggcatggcttgcagctgaggagccgcatcataagaatacacaagacggcccgccgccgaatcatcataattctccttcccgaccgtccggatgaacgcttcttttgcctctcgtgaaatcatgttctcccaacctccctgataagaaaagcgttttcatttaattgtaaagaaaaacgattccgcacactatggagaaacatatgaaaaatgatgatatgattacgtgctttttgtatgttgatctaaaaagcgcagcgccaaataaaaagccgttatgtcttcagggcggtccagcttcatatttgtcagtgattccagtttggaaagacggtagcgcaatgtgttgatatgaatatgcatgtcgtcggcggtgcgctttaacgataattgccggtcgaaaaaggcgcgcagcgtatccagaagttcttcccggccgagtacatgctcgagaacccgccgtgaaaattccgacttcgtgcggggtgtgatatcggtaagacacatatccagttttaaatcttcttcaaagacggcctgcttgtcaccgattccggctgaaagtgctttatctgcctgttcgtatgattccgtgaggcgctctcccggaacgatccgtccgatgccggcggtgacatgctgcccaaaaacggctccgatctttttaatgagctgtgttttggaagccgaatttgcttcatgattaatgagaattcgttcatttccccagcggacaaacaggtcttcagggcattcgtactgccagagccgcccgagctcctccgctttatattgctcataacgtccttgaatgagtatgatccggcggtatgcgtgaaggtctgtgccgatgagctttgctttttctaaaaagcccggagaccattctttcagctgcagccaatcaaccataaaggattcaagcattctcgcacgccactgcgcttcttccatatggcgcgtttctttaataaacagctccgtcatttttctgagcaattctccgaaaggcaggatatcgtcagggtctcctgtcaggccgaatactccgatcacttcatgacctgaaaaaacggggaggttcagtcctgcttttacgccctcgagccgtttttcatcttctttcgtaatgatgacattccgtttttcgcgcgcgcagatcagtgcgccttcatgaaaccatccggcgcgcgcctcgttggtgcccgcgatgatcatgccttttgtatcggcaataatcacttcgcggctgtacatatgtttgacttcggcaatcaatttctttgccagttccggctgtaactgcatggcgatccccctcgccattattatacaaaaaaaaccgggtgtcccatcacccggttcatgcttattgcgcaggttttaatccgccttcaagtgttttgagcatttcatttttttctgagtccgacgcatgctgccaaagaacttcgaataagacgccgaggcccggaagcattttttcttcaccgctttggatggcgtcaacgatagtatgctccagctgatcctggttattgccggttacattggcaataacggcgttgcgtaaattaagatccattacaaccgctcctttttctgaatgtgatacgcatattcttaccgcgcacgcggtttattatgtgctgttcttaagatataataacaacatgcatgaaaaaaggagagcacagacataaagtgaaacgaatcgactctgcaaaaaaccaaaaagtgaaggactggaaaaaacttcacacaaaaaaagagagacttaaaacgaatacatttctgatagaaggagagcatctggcagaagaagcgctcaaatcaaagggaacggtaaaagaaattctcgtaaacgatgagagcgccatcccggccgatctggacatgagcattccgtgctacgtgctgagcgaagacgcgttttcagccgtgacggaaacagaaacgccgcagcggatcgccgcggtctgccatatgccggataggcagcctgatcagctgaagcggctgcttctgattgatgccgtgcaggacccggggaatttaggaacaatgatcagaacggcagatgcggcgggaatcgacgccgttgtccttggtgagggaacagcagacccgtacaatggaaaaacgctgcgttcagcacaaggttctcattttcatattcccattttgaaacgtccgcttgatgagtttaccgctgagctgaaatcacaaggcgtcgcgatctacggcacggcgcttgaaaacggtgcggcttatcaaagcgtgaagcctgaagaatcgttcgcgttaatcgtcgggaacgagggggcgggagtggacgccggccttctgcaaaaaacggatctcaacctgtacgttccgctgtacgggcaggcggaatcgctgaatgtggcggtagcggccgccatcctcgtttatcatctcagaggataggttgcgaaaagccttggatttcactataatagatagcaataatgtaaaaaccgtgacagaggacgtcaatttttgcacacactgccttccagggagaaaatgccgctgactgagagcatttttatcgcagcacaaaaattgattttcacctctcgagttgtcaccgggaccgcgccaaacgcgcgtaaaggtgaaccggaacgatcgtttccgttatgtcaatgaagctgtcggcagatgaagtctgccttaaaaagggtggtaccgcggccacaactcgtcccttctctcaaggggcgggtttttttgttttctgaaaaaggcatagaacggtttggtttacataaaaggaggatgcatgatggaagagaagcttaaacagctcgaactggaagctgcagaaaaagtagaagcggcgggttcattaaaagaagttaacgacattcgggtgcaatatctcggaaaaaaagggccgattacagaagttctccgcggcatgggcaaactgtccgccgaagagcgcccgaaaatgggagcgctcgccaatgaagtgagagagcgcattgcagcagccattacggcgaaaaatgaacagcttgaacaagaagaaatgaataaaaaactcagcagccagacgattgacgtcacgttgccgggcagtcaggtaaacatcggcggacgccatccgctgacggtcgttattgaagaaattgaagatttatttatcggcatgggatataccgtcgaagaaggccctgaagtggaaacggattattacaactttgaggcgctgaacctgccgaaggaacatcctgcccgcgacatgcaggacagcttttacattacagaagaaatgctgatgagaacgcagacgtcaccggtgcagacgcgcacgatggaaaagcataaaggaaaaggccctgtcaaaatcatttgtcccggtaaagtgtatcgccgcgacaacgatgacgcgacacattcccatcagttcatgcagatcgagggtctcgtcgtcgaccgcaaaatcagcatgagcgacctgaaaggcacgcttgaattggtcgccaaaaaaatgttcggccaagaccgtgaaatcaggctccgtccgagctttttcccattcacagagccttctgtcgaggtggatgtgacctgctttaagtgcggcggacaaggctgctccgtctgcaaaaaaacaggctggatcgaaattctcggcgccggcatggttcacccgaacgtgctgaagatggccggattcaatcctgaggaataccagggttttgctttcggaatgggtgttgaacgtatcgcgatgctgaaatacggcattgaagatatccgccatttctataccaatgatgtcagattcatttcgcagtttaaacaggcgtaagaggaggatacacatgtttgtttcttataaatggttagaagattacgttgacttgcagggaatcgacccggccgtgcttgcagaaaaaattacgagagccggtattgaagttgagggtatcgagtataaaggggagggcgtaaaaggcgttgtcatcggacacgtgcttgagcgcgaacagcacccgaatgccgacaaactcaacaaatgccttgttgatatcggtgcggaggaacccgtgcagattatctgcggcgccccgaatgttgataaaggacagaaggttgccgttgcaacggtcggagccgtgcttcccggcaatttcaaaattaaaaaagccaagctgcgcggcgaagcgtctcacggcatgatctgttcccttcaggagctcggcattgaaagcaagctcgtggcgaaagaatatgcggaaggcattttcgtttttccgaatgatgctgaaacgggagctgacgcaatggcggcccttcagcttgatgatgcgattttagaattgggcttaacgccgaaccgcgccgacgcgatgaacatgcttggcgtggcttatgaagttgcggctatcctcggcgcagaggtaaagcttccggaggcttcatatgaaaaagcggcagaaaaagcggcggatgctgtttccgttaaggttgaagatacgcaggccaatccgcattatgccgcaaaaatcattaaaaacgtcaaaatcggcccgtctccgctatggatgcagacgaagctgatgaatgcaggcatccgcccgcataataacgtcgtggacattacaaacttcgtcctccttgagtacggacagccgcttcacgctttcgattacgaccggttcggttcaaaagaggtcgtcgtcagaaaagcggcggaaaacgaaaccatcgtaacgctggatgaacaagagcgcaagctgtcaagcagccatttggtcatcacaaacggaaaaaaagcgcaagccgttgcgggagtcatgggcggagctgagtctgaagtccgtgaagacaccactgcgattttactggaggccgcttatttcgacggacagaccgtccgcaaagcgtcgagagacctcggattgagaagcgaagcgagcgccagatatgaaaaaggcattgatccggcacgcgttttgctggcggctgaacgggcctgcagtctcattcaggcatatgccggcggagaagtgctctcaggcacggttgaagaaaaccatctgaaaatcgaagcaaacaatattcacgtgtctgttgaaaaagtgaacgccgtgctcggcatgacaatcgctaaagaagaaatcatcagcatttacaagcgcctcgggtttgcagtcggtgaagctgaagacgttctcgtcgtaacggtgccgtcgcgccgcggagatattagaatagaagaagacctgattgaagaagcggcgagattgtacggatatgacaatattccgtccacgcttccggaaacggccggcacgacaggcggcttgacaccgtatcaggcaaaacgccggaaagtgagacgttttcttgaaggagcgggtctttcacaagcgaccacttattcattaacgaatgataaaaaagcggccgcttttgcgatcgaaaaatcattcaacacgatgcttgctctgccgatgagcgaagaaagaagcattctcagacacagcctcgtgccgaatcttcttgaagccgtttcatacaatctggccagacagactgattccgttgctttatatgaaacgggttctgtatttctgacgaaagaagaaaacacaaaaccggttgaaaaagaacgggttgccggagctgtaaccggattgtggcgcaaaaatttatggcagggtgagaaaaagccggttgatttcttcgtcgccaaaggaatcgttgaaggcctgctgcatcaattgaatgtgtcagaccgggttgaatttgtccagtcagaacgcaaaaacatgcatcccggccggacggcaaacattctattgaacggttcgcttgccggatttatcggccaggtgcatccggcaatggaaaaagagctggatatcaaagaaacgtatgtgttcgagcttgatctgcacgcgcttctgaccgaggaaacagaacctgtcgtgtatacgccgattccgaagtacccgtccgtcacgcgcgatattgcgcttgtggcagataaaaccgttacaagcggacagctcgaagccgtgatcaaagaagccggcggcgcgctgctgaaagaagtcaccgtatttgatgtgtacgaaggtgagcatatggaagagggcaaaaaatccgtcgccttctcgctccaatatgttaaccctgaacaaacattgacagaagaagaagtgacaaaagtacatgaaaacgtgctgaaagcgctggaagaaacgtatcaggccgtattaagaggataaagaaaaagcttgcagatcactctgcaagcttttttattatgaccgcttccgttcaacaaggcgtttcgctttttgcgtattggcaaaatgaagtttggtgaacgttctgagcgcaccttctcccttattgatgatcagcttggcggcagcttcatcgacatgcggccccgcgcctttcggaatcgtcatcccagcctctcgggaaagcttatccatttcaattaagaaagaatatcgcgcaatgatagaggctgcggcgacggaaagatgtatgctttccgctttcgtgctgaaaaacgttttttcttttacgatatcccgtccggaaagatgcttaaaataaatgccgggctctgcgaattggtcaatcagaatcgcttccggtttaacgccgttcatttttctcagcagattggaaatcgcctgattatgaaggagcgccttcatttttccttggctcatgcctttttcctgcatctgattgtatttttcgttttttaacacaagcaggctgtaaggaatggttttaattaacagtttggcgatttcaataatctgcggatcttttaaatccttcgaatccttcacaccgagttctttcattaaagaaagttttgttttgtcggcgtaggcgcaggcaaccgttatcggcccgaagtaatcgcctgttccgacttcatcagagccgattactgacatggaggcaatgcccgccgggggagcgtagagcgggtcggccgcttttttgacggttttctttgctttcggcgcctcagccgttccccagcgggccgcttctgtgccggcgttttttccttgaaagagaaccttgcccgagcggtaggctgtaatggtacagcccggaggcttggcctggaagacggcgccctgcggaacggcgggagtaagggagccggcataggattgtttcatttgttccatagcggaagcggatacttttataacagaatgggacacgatataatctccttttttggcacttttcactgtatataccagtgtatcataacagcccgaggctcgtctttccattcaaacgataatcgtggtatgataggaactaggattctcgcggaatggaggagaaacgttgtctgacggcaaaaaaaccaaaacgacagtaaacatttacggccagcacttcaccattatcggggaagaaagcaaagcgcatatgcgccatgtggccggagtggttgatgataaaatgagagaaatcaacgagaaaaatccatatcttgatataaataagctcgctgtattgactgcggtcaatgtcgtgcatgattatatgaaactgcaagaaaaatatgaaatactggagcggcagcttaaagaaaaggaatgaacaccatatgatagatatcatcatcttagttttgctcttaatgggcacattgcttggattaaaaagaggatttatcctccaatttatatatttaacgagtttcatcctctcgattgcgtttgcggcgcttttttacaaaaatctggccccgcatctgagctttatacccgcgcctgatttttccggcgggcaggcggctctgtcttttattaaaggaaacgtagagacggcttattacaacgcgatcgcgtttgtcattttgtttatcatcgcaaagattctgcttcggattatcggagcggcgcttaatatcatcgccagcattccggtcattaaacagatcaacaaactgctgggcggggtgcttgggtttctggaagtctatttatttgcgtttatcctgttatacgtcgcatccgtactgccggtaagcgcgcttcagggtatgctcgcacaatcgacgcttgcaaatatcatcacacatcatacgccgtatctgtcagggctcctgcaagaactgtgggcccagtacggggcataaaaaacttctcttgaccggagaagtttttttcaagctctgcgtcagttgtgccggaggagaaaaatttgtatgatgaaaagcaggaaacgactgggggttaacagtatgcataaaaaagatatcatcaggctgcttgaaacgattgcggtctatatggaactgaaaggggacaacccgtttaaaatatcagccttccgaaaagcggcagcggcgcttgagcaggatgaccgcagcctgtcggaaatcgacgacatgatgtctttatccggaatcggaaaaggcacctacggcgtcattcgtgaatatatgcaggaaggtgtgtccggcacgcttctccaattgcagaaagaagttccggaaggcttggttcctcttttgaagcttccgggcctcggcggcaaaaaaatcgccaagctgtatcaggaactgggcgttcatgacgcggaatcgctgaaagaagcgtgcgagcagcaaaaagtacaggggctcgccggtttcggcaaaaaaacggaggagaaaatccttcaggctctcggagaagccggaaaacagccggaacggtttccgatcggctatgcgctcggcattgcttcagtaattgaagaacatttagcccggctgacggatattcagaaatattcccgggccggcagtctcagaagagcgcgggaaaccgtaaaagatctggattacattatcgctacagatcatccggaggctgtcagagaacagcttctttccctcccgaacgtaaaagacgtgatagcgagcggggacacaaaagtatcagtcatcctgacctttgaatatgagacgagtgtggatttccggcttgtgacagaggaacagtttgccaccacactgcatcattttaccggttctaaagatcacaacattaaaatgcgccagctggcgaaagagcgcggtgaacggatcagtgaatacggagtagaaaccatagaaacaggagacgtcaaaacattcccgagcgaagaagcgttttacgcccacttcggtctgccgtttattcctcctgagctcagagaaagcgggcaggaggtcgacacgtaccgggaagaaacggatcttgtggagcataaagcgataaaaggcgatctccacatgcactcagcctggagtgacggcgctttttccatcagagaaatggcagaagcgtgtatggcaaaaggctatcagtacatggcgatcaccgaccattcccaatatttaaaggtagccaacgggttaacggccgaacggctcaaaaaacaggcggaagaaattgacgcgttaaatgctgaatttgaaaattttcatatttttaaaggcgtagaaatggatattctccccgacggttcgctcgattatgatgacagtgttctgtctgaaatggatcttgtcatcgcatctattcattcaagcttcagccagccggaacatgtcattatgaaacggcttgaacaggcgctgacgaataagcacgtggacattatcgcccacccgacgggacgcctgatcggcagacgggccggctatgaagtcgacatcgacatgctgattgaactcgccgccaaaacaaatacggcgcttgaactgaatgcaaaccccgcgcgtctcgatttgcggactgagcatctgatcaaagcaaatgaaaaaggcgtgactttggtcattaatacagatgcccataatatcgagatgctcgatgatatgaaaacgggcgtgaccgctgcgcgcaaaggctggacggaaacaaaacatgtgttaaacgcccggccgctacacgaggtcaaagcatttctgacgcgcaatgattaagtaaggaggatcacaaaaccgtgcagcaaaaagtgttatcatcacttgaatttcataaagtaaaagaacagattaccgcacatgccgcctcatcgctcggccgggagaagcttctgcagctgaaacctttgacggatctctcagacatccaaaaacagctggatgaagtcgaagaagcatccgcggtcatgcgcttgagaggccatgctccgttcggcggcctgaccgacataagatccgctttacggcgggcggaaatcggcagtgtgctgacgccggcggaatttaccgaattgtccgggctgctgtatgccgttaaacaaatgaagcactttatcagccaaatgacagaagacggcgtcgacattccgctgatacaggcccatgcagaagaactgattacattgggcgatttggaaagggagattaactcctgcattgatgatcacggcgaagtgcttgatcatgcatcccccgctttaaggggaatccgcacgcagctcaggacacttgaatcaagagtcagagaccggcttgaatcgatgctgcgttcatcttccgcttctaaaatgctgtctgacaccatcgttacgattcggaatgaccgctttgtcatcccggtcaaacaggaatacagatcaagctacggcggaattgtccacgatacatcttcatccggtgcgacactgtttattgaaccgcaggcgatcgtagatatgaacaactcgcttcagcaggcgaaagtaaaagaaaaacaggaaatcgaacggattctccggatgctgacggagcatacggctgaacacacacaagaaatcgctcaaaatgtggaagtgctgcagacactggatttcattttcgccaaagcgcgatacgcaaaagcaatgaaggcgacaaaaccactcatgaacggagacggctttatccggctgaaaaaagcgcgccatccgctgctgccccaagatcaagtcgtggccaacgatattgaactgggcggagattattcaacgatcgttatcacgggaccgaatacgggcggtaaaaccgttacgttaaaaacactcgggctgctgacgataatggcgcaggcgggattgcacataccggctgatgagggatcggaagcagcagtatttgacaatgtgtttgccgatatcggcgatgaacagtcgatcgaacaaagtctgagtacgttctcatcccacatggtcaatatcgtcaatattttaaaagacgtgtctgaaaacagtcttgtgctgtttgatgaactcggtgccggaacagatccgcaggaaggagcggcgcttgccatgagcatccttgacgaagttcaccggacaaacgccagagtgcttgcgacaacccattatccggaactgaaagcatacggatataacagacaaggcgtcatgaatgccagcgttgaatttgacattgaaacgctttcgcctacctataagcttctgatcggagtgccgggccgaagcaacgcatttgaaatctcaagacgccttgggcttccggagcatatcatcggccaggcgaagtcagaaatgaccgccgaacataacgaagtcgatctgatgatcgcatcgcttgaaaaaagcaaaaaaagagcggatgaagagctttctgaaaccgaatcaatcagaaaagaagcagaaaaactgcacaaagatcttcagcagcaaattattgagctgaacgcccaaaaagataaaatgatggaagaagccgagcagaaagctgcggaaaaactggaagccgccgcaaatgaagcagaacagattatccgcgagctcaggtccatcaagcaagaacacagatcctttaaggaacacgagctgattgacgccaaaaaacgtctcggagacgcgatgccggcttttgaaaaatcaaagcagccggaaagaaagacagagaaaaaacgcgagctgaagccgggcgacgaagtaaaggtgctcacattcggacaaaaaggggcgctgcttgagaaaaccggcgagaaagaatggaacgtccaaatcggcatcctcaaaatgaaggtgaaggaaaaagatcttgagtttctcaagtccgctcctgaaccgaaaaaagaaaaagcaatcaccgccgtaaaagggaaggattatcatgtatcccttgaacttgacctcaggggagagcgttacgaaaacgccctcagccgcgtcgaaaaatatttagatgacgcggtgcttgccggccatccgagagtgtccatcattcacggaaaaggcacgggcgccctccgaaaaggggtgcaggatcttctgaaaaaccaccgcagcgtgaaaagctcgcggttcggggaagcgggagaaggaggatcaggcgtaacgattgtcgaactaaaataaaaagggagtaaacgtcatgaatgctttttgggaaaatgagcttgttgaaatcgcggcttattacagtgtagccgtcttgtgtctcgtcatttttctgaccgtgtttgaattggtgacatcctataaaaactgggtggaaatccaaaaaggcaatcttgcggtggcaatggcgaccggagggaaaattctcggtatcgcaaatgtctttcagcacagcatcgcccagcataattcgcttttgcaaatgatcggctggggcgtatacggatttattatgcttttaatcagctattttatctttgaatttctgacgccccggtttaaaattgataaagaaattgaaaaagataacagagctgtcggctttatttcatttgtcatctcagtcggcctgtcatttgtggtggccgccgggatttaaggggacggggaaaaatggagaagcttgcgaaagtgctgctgtcggcagcgggaatttttctgttcatcggacttatttatctggtcatgacatcttaatactgaaaaaaggctgccgaactaaaatcggcggccttttttattgagaataccagtttatgcaggccgtatcagagcaaatgacggcttcccaactcatggcgcggatgacagacggcatgtcttgatcttccataagaaagagtgtcgtaaaagaatcatatatgctcataaaagcggcgcgccgtttttcgtcggcaatgatcatgtcagcccgcagcagtccgcatacatccgaagccgccgtttgattgagtgaaattatgcctttctcttcgaccggctcataataagtgcagcgctttatgccttttgaacggaacacatccaaaagtcccggaattaaaaatggtgaagtgacatcatcgctcggcaagtacagatcgggatgaagccgattaaacagcctggcggattcaggatgtgcatattcctcccgcagtgccgtgacagcagtcataagcgcaagcgccgtctctttttcagagcgcaatccgcaaacggtcatgacggtttgccaggaaacgggtctgcccatcgcgatgatctcctcatcactcggatacatatgttcataaggccgtttgcgcttttgctcttcccacccatccggcatccggacaaagggatggagcaaaaaggcggccgacgtaaacggcttcggcagctggcgcaggataggaactccctcttcaaaatgcagcgtttccagcaagctcaacacctcctgaaactcgaaatttcgcatgaaacgctttccaattccaatcacccttctgctataataatagcgtataggaaaacagaagggagaggtattatgcagtctgaaaagccatggctttctcaatatcccgaagagattccgcatgagcttgaatttaccgatcaaaccctgccatccaatctgacaaactccgcagctcaattcccgaaccataccgccatttattttctcggaaaaaaactcacattccaggacgttctcacagattcgttaaagctagccgcttttttacgcaaaacaggcctgaaaaaaggggacagagccgccattatgctgcccaattgtccgcagtcggtcatcgctttttacggcgtattgtttgccggcggcattgtcgttcagaccaatcctctctacacggaacacgagcttgagtatcagctgaaagacagtgcgccgcgcgtgatcatcacccttgatatgctgtttccgaaggtgataaaaatgaaaacgttatcactcgtcgaacgcattattacaacgagtataaaagattttttgccgtttccgaaaaatatgctgtatacgctcacacaaaaacaacaggttcatattgattatgacggctgcgaacaaattcacaaattagcggatattttaaaaaacgaaagagcggaggaagcggagtcatttgatattgacactgcgcatgacatcgccgtgcttcaatacacgggcggaacaaccggctatccgaaaggcgtcatgctcacacaccggaacattcaggccaatacagaaatgtgcgccgcctggatgtacaaaatgaaaaagggagccgaaaaggtgctcggcatcgtgcctttttttcatgtgtacggattgaccgccgtgctcaatttttccattatgcagggatgtgaaatgatccttcttcccaaattcaatcctttggataccctgaaaacaatcgacaggctgaagccgacggtttttcccggggcgccgacgatttacatcgggctgttgcatcacccggagctgaataagtatgatttgtcctccattgaaagctgtccgagcggttcagcggcgctgccggttgaggtcaaacagaaatttgaaaaagtgaccggaggaaagcttgtggaaggctacggattatccgaagcatcaccggttacccattcaaacttcatttggggaaaaaataaacccggcagcatcggctgtccctggcccaataccgatgccggaatctattcagaagaaaaaggcgggcttgcggggccgtatgagcatggcgagctgatcgtaaaaggccctcagatcatgaaaggatactgggataagcaggaggagacggcgcgtgtcatcagagacggctggctgtttaccggagatatgggatatatggatgaggaaggatttttctacatcgccgacaggaaaaaagacatcatcattgccggcggatacaacatttacccccgggaggtggaggaggcgctttatgagcatgaagccgttcaggaaatcgtcgtagcgggcgtccctgattcctacagaggggaaacggtgaaagcatttatcgttttgaaaaaaggcgccgaggcagatgccgatgagcttgatgcgtttgcaagagagcggcttgcgccgtacaaagtcccgaagctttacgaattcagaaaagagcttccgaaaacggccgtcggaaaaatattaagaaggcgtttagtcgaagaggaagatgcttcccgtgaaaacaaggtgccttaaaagaaaaacttgacaaaatccggattcctttttatcatgaagttatgaatgaatagtcattcatttatcgaaggaaggaacgatgacattgaaccaaaaacggccaaagtatatgcagattattgatgcagcagtagaagtcatagcggaaaacggctatcaccaatcacaggtgtccaaaatcgccaagcaggccggcgttgcggacggcaccatctatttatatttcaaaaacaaagaggatatactcatttctctttttaaagaaaagatgggccagttcattgaacgcatggaagaagaagtgaaagaaaaaacgacggcaaaagaaaaactcgccctcgttattaagcagcatttcacactgctcggcaatgaccgccacctcgcgattgtgacccagcttgagctcagacagtcaaatatcaagctgcgcctgaaaatcaatgatattttaaaaggttatttaaacatgctggacaccattttgaccgaaggaatcaagtcgggggaatggaaagacaatctcgacgtccgcctcgcccggcagatgatattcgggacgatagatgaaacagtgacaacatgggtgatgaacgatcaaaaatatgatcttccggatttgtcagacaaggtattggagctgttggtgtcaggaattcatcaaaactaaagggggttgacggatgaacagcctttcgatggcggtagaacaatctgttgcggtgatcaccattaatcatcagccggccaacgcgctatccggtgcggttttagacgagttgtccggtctgttcgaccgatgtgaaacagatgacagcgtcagaagcatcatcattcgcggtgaggggaaatttttctcggcgggcgccgatataaaggaatttacgtcgcttgaaaatcttgagcaatcttctgccatggcggataaaggccagcagctgatggaaagaattgaagggtttccgaagcccgttatcgcagcgattcacggcgctgcgctcggaggcggtcttgagctagccatggcctgccatatcagaatcgctacattagatgcaaagctcggcctgcccgagctgaatctcggcattattccgggctttgccgggacgcagcggcttccccggtacgtcggtacggcgaaagcgcttgaaatgatcggcacttcagaacctgtgtccggagaagaagcgctcagcctcggtcttgtcacgataggcgccgaacatgaggaagagctgctgaaaaaggcgaaaacactcgcgggcaagtttgcggaaaaaagcccgcagtcgatggcttatctgcttgagctcctttattcaaacaagatctattcttatgacggcggcttaaagcttgaagcaaagcgctttggggaagcatttgcatcagatgacgcaaaagaaggcattcaggcatttctcgaaaaaagaaagcctcaattcggtgggcgaagataaaggggataagattatgaatctatttgtactgatgaaacggacgtttgacacagaagagaaaatcgtcattgaagcaggaaagattcaggaggacggggccgaatttatcattaatccgtatgatgaatacgccattgaagaagccattcagctgaaggaagagcacggcggaaccgttaccgccgtaaccgtcggcggagaagatgcggagaaagaactgagaaccgcccttgcgatgggctgtgaccaggcggtgttaatcaatattgaagatgatctgagcgatcctgaccaatactccatttcaactatcttatatcattatttcaaggaccgggaatatgatctgattctcggcggaaatgtcgcgattgacggcggttcaggccaagtggctccaaggcttgccgaactgctgaacattccttgcgtcacaacgatcacaaaactgacaatcagcggcgatgaagctgtggcagagaaagacaatgaaggggataccgaaatcattaaaacctcacttcctttagtcatcacggcacagcaaggcttaaacgagccgcgctatccgtcgcttccgggcattatgaaggcgaagaaaaaaccgctggaagaacttgagctcgatgacctcgacattgatgaagatgatgccgcaccgaagctcaaaacgatcgaacgttttctgccgccgcaaaaagaagcgggcagactgatcgaaggagaagccgctgagcaggcgaaagagcttgtgtcactgctgagaaaagaagccaaagtcgtataaaccgatattaaagaaactgggggatgtcagaatgggaaaaaaagtgatcgtactcggagaaattcgtgacggcgccttacggaacgtcacctttgaagccatagccgcaggcaaaaccatttccggcggaggagatgtcatcggcgtgctgatgggaaaaggcgcggctgatgcagcaccagaactcattcagtacggcgccgacaaagtatttacggccgatgcgccggggcttactcagtatacggcggacggatatgccgcggttctcggggatttgatcgaaaacgaaaagcctgatgcggtcattttcggccacacttctatgggaaaagatttgtcacctaagcttgcggcccggtttgaaacggggctgatttcagacagcacggatgtaagcgttaccggagacaacatcgtttttacaagaccgatttattcgggcaaagcctttgaacaggtgatttcaaccgatccgttcattttggcgacaatccgtccgaacaacattcaggcattagaaaaagacgcgagccgcacgggtgatattgaagagcttgcggcacctccggcagatttgcggacggtcattgaagaagtagtcaaaaaaacggcggacggcgtggatttatcagaagcgaaaattatcgtagcaggcggccgcggtgtaaaaagcaaagatggatttgaaccgttaaaagaacttgccgacgtgctcggagcagcggtgggcgcttcacgcggcgcgtgtgacgcggactattgcgattattcccttcaaatcggccagacgggaaaagtcgtcacgccggatttgtatatcgcctgcggaatttccggagcgattcagcacttggcgggcatgtcaaacagtaaggtcatcgttgccattaacaaagacccggaagcggaaatatttaaaatagcggactacggaattgtcggcgatttgttcgaagtggttccgcttctgacccaagaatttaaaaatgccaatattcattcataatcaaaaccctctggctgatttgtcagagggttttggtttttgttaattggttcggacaaattaaagattaataaaacaatagattgacatgtacgaaccaatgtaataagcttttgtaaagcgcttacaaacttatccattcagcatacatcccagatacatagatcggctgtagtgctttcattcttattaagggaaaggaatgatcaagtttgtctcacaatacggcagtcattcaaactgatatcacacggggaaccattaataaaaacatatacggacatttcgcggaacacctgggaagaggcatatatgagggcatctgggtcggaaaagattccgatattccgaataccggcggggtcaggacggatgtcgccgccgccctcaaacagcttcagattcccgtcctcagatggccgggcggctgttttgctgatgaataccattgggcaaacggcgtagggaaacgcaaaaccatgctgaatacccattggggcgggacaattgattccaatgaattcggcacgcacgagtttatgatgctttgtgaactgctcggctgcgaaccgtacatcgccggaaacgtcggcagcggaacgattaaagaaatggctgagtggattgaatacatgacgtttgaagcgggcacgccgatgtccgactggagaaaagaaaacgggcgggaaaaaccgtggaagctgacatatttcggaataggaaatgagaactggggctgcggcggaaacatgcatcctgagtattatgccgacctttacagaaactttcaaacctatgtccgcaattacagcggtaatgaaatctataaaattgccggcggcgcgaatgtcgatgattaccgctggactgaaactttaatgaaaaaagccgctgatctcatggacgggctgagccttcattattacacaataccgggcgatttctggaaggggaaaggatctgcgacggagtttacggaagatgaatggttcatcacgatgaaaaaagcggcgcatatggatgaattgatcacaaggcacagcgccatcatggatcagtacgatcccgaaaaaagagtcgggctgatcattgatgaatggggcacgtggcttgatcctgagccaggcacgaatccgggctttctgtatcagcagaatacgatccgcgacgcccttgtcgcagccacgcattttcacatttttcatcagcacgcagaccgcgtacagatggccaatatcgcgcaaaccgtcaacgtgcttcaggcaatgatcctgacagaagggaaagacatgctgctgacgccgacatatcatgtgtttgatatgtttaaggtgcatcaggacgcttctcttttggcgacagaaacaaaagcagccgggtacgaatggaatgacggccggctcccgcaagtcagcatttcagcgtccaaacagcaaaacggagacatacatatcagcctttgcaatatcgatcatctgcacaaagctgatgtgaagattgaactgcggggcatgaaaaaggcagggaagccttcgggaacgattctgcacgcggaaaaaatgaatgcccataatacgttcagcagtccggaaaacgtcaaaccgaagccgttttccgggttttctcaaaagggcggaaaacttgaggcggagcttcctccgatggcggttgtactaatcacgctgcctgcgaatccatcttaagttttgaacgcctgccgcccggttataatacactgtataaataagattatttccggcgggatcgggagaaaataatataagcattaaattagcatgaacgaatgggagatgctatactaaaaatcatcatttgacaattggaggaataacaaatggctatcgtaaaagcaactgatcaatcgttctcagctgaaacaagtgaaggtgtcgtattggctgatttctgggctccttggtgcggaccttgtaaaatgatcgcgcccgttcttgaagagcttgatcaagaaatgggagacaaactgaaaatcgtcaaaatcgacgtggatgaaaaccaagaaactgccggtaaatacggcgtcatgagcatcccgacacttctcgtattgaaagacggagaagtcgttgaaacatctgtcggtttcaaaccgaaagaagctcttgaagagcttgtaaacaaacatctgtaagccgaaagcttccgttacggcagggcgattcctttgaaagggaatcgccttttttgatcttccaaaagctgagaatggagaaaaacaaatgttcgtgatacactgaatggacacgagaaatgaatgtaaggaagggtaacgtatgaataaacaactgaaagaaaagctggccctccttcccgatcagccgggctgttatttaatgaaagaccgtcaaaaaacagtcatctacgtggggaaagcgaaagtcttgaaaaacagggtgcgatcttatttcaccggttctcacgacgcaaaaacccaacggcttgtgtcggagattgaggactttgaatatatcgtgacttcctccaatcttgaagcgcttattttggaaatgaatctgattaaaaaatacgatccgaaatacaatgtcatgctgaaagatgataaaacctatccctttattaaaatcacccatgaacgccatccgcggctgattgtcacccggaatgtcaaaaaagacaaaggacgctatttcggcccgtatccgaatgtgcaggcggcgcgggaaacgaaaaaactgctggaccgcctttacccgctcaggaaatgctcaaagcttccggaccgcgtctgtctctattatcatctcggacaatgcctcgccccatgtgtaaaggatatatctgaggagacaaaccgcgagattgttgaagacattacccgttttttaaagggagggcataacgaaatcaaaaaagagctcgaagcgaaaatggcagaagcggcggaaaagcttgaatttgaacgggctaaagaattccgcgatcagcttgctcacatcgaatcgacgatggagaagcaaaaaatgaccatgaatgaccttctggaccgcgatgtgtttgcatatgcctacgataaaggctggatgtgcgtccaagtctttttcatacgccaaggaaaactgatcgaacgcgacgtcagcatgtttccgatgtatcaggaagcggatgaagaatttctgaccttcatcggccagttctactctaaaaacaatcactttctgcctaaggaaattctggtgcctgacagcgttgacagggacatgatcaccgagctgttggaaaccgccgtgcatcagccgaaaaaaggcccgaaaaaagagctgcttttgcttgcgcacaaaaatgcgaaaatcgctctgcgggaaaaattctcgttaatcgagcgggatgaggaacggtcaatcggtgcagccgaacggctcggcgaagcgctgaatatttatacgccgcatcggattgaagcgtttgacaactccaatattcaaggcacaaaccccgtatcggccatgattgtctttattgacggaaaaccgaataaaaaggaataccgcaaatataaaattaaaaccgtaacagggccggatgattacggctcaatgagggaagtcgtcagaagaaggtacacgagggtgctccgcgaaaatcttccgctgccggatttaatcattattgacggcggaaaagggcagattaacgcggcgcgcgacgtgcttgagaatgagctcggccttgatgtcccggtagcgggattggcgaaagatgataaacaccgaacatccaaccttttgatcggcgacccgcttgaaccggtgtttctggagcggaacagccaagagttttacctgcttcagcgcattcaggacgaagttcaccgttttgcgatcagctttcacagacagatccggggaaaaagcgtctttcaatccgttctggacgatatccccggaatcggcgaaaaacgcaaaaaaatgctcttaaaacatttcggatctgtcaaaaagatgaaggaagcaagccttgacgatatcaaaaaagcgggtgtgccggccgcggcggcccagctgctgtttgaaaaattaaaaaaatagtattgtgcttttctgaaaaatctgctagaatgtgaactaatttcataagatcgtgttatatggtgaagatagaggtgcgaacttcaatagtaagcctttggagaatgatggattctgcgaaaaaggctgaaaggggagcgtcgccgaagtgtatcacatcccatcggtgtgattcgctggccttgcattaaataaatgtaaggctgtcaagaattcattttcttggagggctatctcgttgttcataatcaatcgtaatgatatgaaaaagcaatgagagctattcctctcattgctttttttattgtggacaaaacgctcttttctcctcacccgcacgaaccaaaatgtaaagggtggtctagtatgggtcttatcgtacaaaaattcggaggcacttccgtcggctctgccgaaaaaattcaaaatgccgcaaatcgcgccattgctgaaaagcaaaaaggccatgatgtcgtagtcgtcgtttcggcaatgggaaaatcaaccgacgcgctcgttaacctcgcggctgaaatcacatctgaaccaagcagacgcgagatggatatgcttttgtctacgggagagcaggtcacgatttcgcttttggccatggcgcttcaggaaaaaggatatgacgccgtctcttatacgggctggcaggcgggtgtccgcacggaagccgttcacggcaatgcgagaattacggatattgatatcacggcgattcgttcgcagcttgcagaaggcaggattacagtcgttgccggttttcagggcgtaacggaagacggaggcatcacgacgctcggacggggcggttccgatacgacggcggtcgctcttgccgcagcgctggaagcggataaatgcgacatttatacagatgttccgggcgtatttacgacagatccgcggtatgtccggtcagcgagaaaactggcgggaatttcttatgatgaaatgctggagcttgcaaatctgggagcgggtgttcttcacccgcgggcggttgagttcgcgaaaaactaccaagtgcctttagaagtgcggtctagtacggaacatgaagcgggaacattaattgaggaggaatcatcaatggagcagaatttaatcgtcagaggaattgcatttgaagaccagatcacgagggtgtccgttacaggccttgcaagcggattgacaacactttcaacaatcttcaccgcgctggcaaaacgaaacatcaacgttgacattattattcagacacagtcggacgatggggaagcggatatttctttctcagtgaaaacggaagatgccgcgcaaacggtcgccgtgcttgaagaatataaaaacgcgcttgactatgaaaaaattgaaaccgaaagaaaactggcgaaagtctccattgtcgggtcgggcatggtttcaaatcccggcgtcgccgcggacatgtttgccgtactggcggaaaaaaatgtacaagtcaaaatggtgagcacatctgaaataaaagtatcagcggttgtcagcgaaaatgatatggtgaaagcggtcgaagcgcttcatgatgcgtttgagctttctaaacagccgtctgccgtgtaaacgggcaggcaaaaaggcgggacttggagtcaccgccttttttcaattatacagggtctttcatatcccattttacagtcaggacgactttatccgctctcttttttacctgttcataagattctgcaatctgatcgttcatcaattgaatctgttcggctataaaaccggcttcaagctgaaaacaaggctctttctgatgtttgagcctgctggatacgagcggtccttccagttcaaattccagttcttgtttttttgatcctgtgtttgtcaaagttccccagccggctttttcaaaaaaggcggggatttcttcccacgattgaagaggaaatttgcgggcgaggcgttttcccgcccaatacatcatcgatgaatgctccgggccgaggatatccggaagcacgatttcccggattaattcgtagccgtatgcgctgacgtcgagttcagttaaaggttctaaagctgcttcataattattcttcatattatgtattcccctctctccttcgtttattatagcttaaacaggggggaggattacaggatgatcctataaaacacgcgaaaaaatgtgagaaagatatcgcaggaaaataaaattttccctccagataatcaattccgaaaattataatttatgtacacgttttcttgacgcccttttgaggtaggagtaaaatgaaattgtcaataaattttaataaagtgcttacaattgaaacgaagtgggggcagagattttagtacatttcgcacttaaatcaaacagggggtaaagtaatgtctgggaacagagagttttattttcgaagattgcattccttgctcggtgttattccggtcggcatctttttgatccagcatttagtcgtcaaccaatttgccgcaaggggagcggatgcgtttaacaaggcggccggctttatggacagtctgccgttcaggtatgcgttagaaatttttattattttcttacctttaatttatcatgcggtttacggtgtgtacatagcatttactgcgaaaaacaacgctggccactacagttatttcagaaactggatgtttgtgcttcagcgtgtcactggtattctcacccttattttcgtcagctggcatgtgtggcagacgcggattgccgcgcagatgggcgctgaagtcaacttcgatatgatggcgaatattttgagctcgccgtttatgctcggtttttacattgtaggcgttttatcggtcatttttcacttttcaaacggcttatggtcttttgcggtcacatgggggatcacggtcacgccgcgttctcaaagaatttcgacttacgtgacgctgattatatttttagcgctttcatacgtaggtttaaaagcgatttttgcgtttgtgtaagagaactagattactagagggagaggggctatcatgagtcaatcaagcattatcgtagtcggcgggggtcttgccggcctcatggcgacaattaaagcagcggaatcaggcacggccgttaaattgttttccatcgttccggtcaaacgctctcactcggtctgcgcgcagggcgggataaacggagctgtcaacacaaaaggggaaggagactctccgtttgagcattttgatgacacggtatacggaggcgactttttggcaaaccagcctcctgtaaaagcgatgtgtgaagcggcgccgtccattatccacttattggaccgcatgggggttatgtttaacagaacgccggaagggctcttggacttccgccgtttcgggggtacacagcatcacagaaccgcatacgcgggagcgacgacgggtcagcagcttctttacgcactggacgagcaggtgcgcagatatgaagtggcgggtctcgtcacaaaatatgaaggctgggaattcctcggcgccgttcttgacgatgagcgcacgtgccgcggtatcgtagcccaaaatctgaccaatatgcaaatcgagtcattccgttctgacgccgttattatggcgacgggaggtcccggaatcgtattcggaaaatcaacaaacagcatgatcaacacgggatctgccgcatcaatcgtctatcagcagggcgcttattatgcaaacggcgaatttatccaaattcacccgacagcaatcccgggggacgataaactgcgtctgatgagtgaatcggcgcgcggcgagggcggaagagtctggacgtataaagacggaaaaccttggtacttccttgaggaaaaatatccggcttacggaaacctcgtgccgcgggatattgcgacacgtgaaatctttgacgtgtgcgtgaatcagaaactcggcatcaacggagaaaacatggtgtatctcgatctgtcgcacaaagatccgaaagagcttgacgttaagcttggcggcattatcgaaatctatgaaaaattcatgggcgatgacccgcgcaagcttccgatgaaaattttccctgccgttcactattcaatgggcggactgtgggttgattatgatcagatgacaagcatccgcggactgttcgcagcgggtgaatgtgattattcaatgcacggaggaaaccgtttaggggcgaactctctgctttccgccatctacggaggaatggtggccggaccgaatgcggtgaaatatgtttccggacttgaaacatcagcggaagacctgtcttcttcattatttgattcctatgtgaaaaaagaagaagaaaaatgggccgatatcatgaagatggacggcgacgaaaatgcctacgtgcttcaccgtgagctcggagaatggatgacggccaacgtcacggtggtccgccacaacgacaagcttttgaaaacggatgacaagatccaagagctgatggaacgctttaagaaaatcaatatcaacgatacgacaaaatggagcaaccaaggcgcgatgttcacccgccagttctccaatatgcttcagcttgccagagtcatcacgctcggcgcatataaccgaaatgaaagccggggagcgcactataaaccggatttccctgaaagaaatgacgatgagtggctcaaaacgacgatggctaaacatgccggtccgtttgaagctccggaatttgaatatcaggatgtcgatgtatcactgattgcgccccgtaaacgcgactactcgaagaagaaggtggcgaaataatcatgagtgagaaaaagatacggtttatcattacacgtcaggatacgcccgaaagcgcgccatacgatgaagaattcgaaatcaattaccgcccgaatctgaacgtgatttccgccctgatggaaatccgcagaaatcccgtgaatgcaaaaggagagaaaaccactccggtcgcatgggacatgaactgtcttgaagaagtatgcggcgcctgctccatggtcatcaacgggagaccgcgccagtcatgtacggcgctgattgataagctggaacagccgatccgtctgaagccgatgaaaacattcccggttgtccgtgaccttcaggttgaccgcagcagaatgtttgattcactgaaaaaagtgaaagcatgggtgccgattgacggaacttacgatttggggccggggccgagaatgccggaaaaacgccgccagtgggcatatgaattatctaaatgcatgacatgcggcgtctgcctcgaagcctgcccgaacgtcaacagcaagtcgaaattcatggggcctgccccgatgtcgcaagtccgtctgtttaacgcccatccgacgggcgcgatgaacaaagcagaacgtttagaagcgttaatgacagacggcggcctcggagattgcgggaattcacaaaactgtgttcaatcctgcccgaaaggcattccgcttacgacttcaatcgccgctttgaacagagataccaatttacaagcattccgtaatttcttcggaagcgacagagtataagaaagagaaaaagagcctcttccgcacgggagaggtttttttataaggagctgaaggtgatgaaacagccgcaatatattgatatcccgtttgaagaatggagacagtcgttttctttctttactgaagtatcggttcgtttttcagaaacggatatgttcggccatatgaataatgtaacccctttcatctattttgaagaagcgcggatcgcttattttaaacagcgaggcataacggcgcaaaactcggaaacgatgacggtcgtcgcaagccagcagtgcgactatatgcgtcaggtgatgccgtatgaaaatctgcggatttatgtgaaagcaagcgctgtcggaaatgcgtccgtcacccttcattaccttggagaaaatgagtcgggcctgccgtgctttacaggttccgtcgtcatggttcaagtgtcgaagaaaagcggcaaagcggtcagctggacggagcgggagaaaggcattctgctcgcctgaacggataactatttctctaagagacgtcacctccgaagcgccttttacatatgatatcttgactatataaacccattcgtttcagattcgctctcaccttagcaaggagggttacaatacttgaaggagaaagattttcaatcaaagccgctgctgaccaaaagagaaagagaagtattcgaattgctcgttcaagacaagacaacaaaggaaattgcaagcgagctatttatcagtgaaaaaactgtacggaatcacatttcaaatgagatgcatacctgttgcaaacaaagagccttttcaggctctttgttaaataatgagtgccattttataaaaacaatgctggacatgcaggaaggggaataaacgttcggttattaaccagaaaataaaagcccatttgggcttttatttattacactgcagctgttggagaatacaatgttttttgagctaatgcataatattctttaattgctttttctctgttgtatatttctgaactttgtccattgacatttgaagttagtcgaagtaatttattctctttattaaaaaagtaagtgaaagttgctatttcatctttgtcaattttacatttgctggttccgataataaaatcatcctcagttttaaaatcgactgaaatataatttggtaatttaacgttctcgagtaactcataaggagttagctttggtccgtgtatttcatcgtaaagatgttcaattatactcatttgttaagacacctctttactttaaatttttggtgattatatttcttaagtgagcatctaactttttaacaaaatcaataccacgatcatagtcgtctaattcccattcgcttcttgccgcaccaatatgatctcttaatgatatattaaagtaaaacccgagtaaagccccattttctttacattgtcggtataaaaatgtatatttatttggaagtaagaacttattttttattagttcatcattctcgagttctaaattaaaatcaactaataattgagggataagctcctctcttattaattggtcaatctcttgttttttattttttaaaaataaatcaggtcgtaaataacgttccttatcttgcgataccaggctttgttggtaaaaggctttggctttttcttcagaaacatttaataatttttgaagttcttcaatcttttttctttcttcaatttgtttttcttttcggatttttaataattcactttcaataaaagagtccttttcagtcttaaattcctcggactcttttacgaaaccaaaagaaacattcttaggtccacggtctgttggttcaattggatagtctgtctttatttcttttataatatcccttttctttatttcttttttataaaaatcccaaagtttatctagaccgagttctttatgatggatagctactgcaatattatcttcttcattaacagttccatttacatcattatctgataaagaacgtaataccctgccaataaattgtgcataagggagcagtgttttgaaaggtctaaatatcgcggctatagacaaaaatttgtgatcatagccttctcctaacatggctacattgataacaacgtccacttcgtgtttttcaattttctgaaattctttttctctgtcacttttttctaattcactatgtacaatagaacataaataaccctgttcttcgtacaatttttttatttgctcggcatgccaaatactgcatgccacagcaatgattttgtgtgggtgattagttttttcttttttttcttctaagtaatgaattgactgagaaataatgcttttattactatctggggacagggcaactgatcttaatatccaatcttcgtcctttattcccatctttcttatttcctcaagtgtatatgtcttctcatcatttttatccaatgttaaataaactttatcaggaatgtaatcaattttttcaaggctttttacatatcctttagccattgcttttccaagactgtatgtataaacctcttgtccttggatttttcttccgtcacttctgaaaggagttcctgtaactttaagcactttagcgttattgaaatattctaaagcctttttccaggtttttgcttccgagtgatgagcctcatctataataatcaagtcaaaaaagtctttggaaacccgtcttattagagaagaatgcagtctttcttgtaatttatgaatgtttaatattacaatatcagcttggtttaaaatctcttcagttagtgttttatcatattctataactgaaggtaattcagtatagttttcaaaaattcttgtgaagagccaaaaatttttagagtacgccggatcaagtgaaccaagaacagcatctcttataacagtttgaggagttataattaatacctttccattagaaatttcatatggtgcgattcccataaggcctgtcttaccagtaccagtaggtaaaaccacaagagcatgttcagtactttgttttatcagaaaatgctctttcagtttttcataggcttgaatttgtggctctcttaagtaactattctctgatatatttggatttgctgttttaaagtaagacatattttcccccatcaatttaaatttccaacttaatacaatgttattataaacaacttatagaggctattgtactaattcgacaaaacaagacaatttttgtattaaatcatgtttaaagaaagaaattagtgatataacagggtttcatatatcaaaccagtggcaaaaaaagagcctgttttatatgatcagcctggctttgtttaagtacatatttaagcggagatacgcaaatgattcaggcactttgaatatgtcggcaatgacttgcgccgcgaagtattgattatgagggatttcaatttgccgaagcatgaatgtaggaatgcagaaatgatatgcaaaataattcgcctgacactctaaatattccttccaataaatcggcatgatcttatcgttatttacatgtcttaactcgtggcagacctcatgagaaaaatcaagccattgttcttttctggactttcgggaatctaaagagatggtgaacattccattaaagcgcagcgcaaaacttgttaccggattgtatacgattaaaatatccagcgcatgagcgatatgatcaaaattaatgtcatatggatggagaatgtttatttctctatatagcctttcaatccaatcttccagatgactttgtgtgtataccaagatgaacgcccccttaaattgtggaaattaaaatgtgtacaatcttcctatggtaaacgtgactaaaagcctattgaaaattaaattgcaaacgtatgttctattttaagtgaaaaagaaaagcccccgcaagagggcattttttatttttcatcctttttcttcgcatcctcaaagctaagaatgttgaaatcgatccttttttctgttccgagctcatcaaatgttttggaatcggtcggagccggaataaccatttttatatttttaatatcctttgaattatcctttaaaacccaccatgtctgatcttctttctttacttttcctaaaaagtctccgcctacttcgcccattaagcccatatcagtctcgacttgttcgcctgtatttgttacgatgacagattgattcggatggaatgtaatatcctttgaagaagtgttttcggccttcaattccattacaactgatcgtaccttgtcttgatcattaaaataaagggacttggcgtcttccgttggcgtaatctccaacactctgacgctttcgatatacagtttcatatcacccattttaacaggcttcagcggtgtgtcttttccgtcaatacctacttcatcgctatacccgatgccaatagtctttacatgccctaatccttcaatatcgccttcgcctgttttttggaatttgtctctaattgcagcgtctttttttgcttgctcttttttcttatcgactttttccactacaacggctttgactttaggcatggacgtgcctgattcacggccctcgtatgtaccatagattttcacagtatcttgcagtttgaatttgtctgagcttttattgctaacagtataagcctctgaaccatcactgtttttgctcacagtaaacgctacattcttcgaaactgtcttcccgtcatcatccacgttatctgcatatgttacgtcaccttcaataacaatcttggtgcccttttttattccagcgctatttacttgagcgtaatcatatggctttgcatctttttttaactgatcttctaaagaaagtgactttgttttgttcgaagagtcatcccctttagaagatgttgagtcagagttgcatgcagctaaagaaaaacttaatgttaaagccccaatacctaacaaccattttttcaaagcaattttccccttttttgtagaaatgaatacactttatttatatcggcagaagccgaaattttttattgtcttctctgtataaaagcggcaattctctctctatataagcgctttttaatgcgatttaacaccgtgttttcctctgatttttttggtactactctggtataccattgggacacgggaggaacacgattgggatacggggtatttcgcgaacccttgataaacgtaggtttatacgcttgtaatatttaacattgggacacggattgtattacattagtttccattcgtttttgttgggtttcttctattagataactaaataactaaagataactaaaataacaaagacgtcgttttttgataaacaaaagatcggtttatcaaggtgatgaaattatgtaattatttgtgtcactacagactaaaaaaaatcaactttcatcagttggcttgtctgggttatatttgttgttgcgaatatcccccggtttgcggcctgcctctaattgctgcgcaattatcttctgtgctgcctttaggatagaatcagtgatcttaccatcagcagcggcaattaatgtgtcagggtcctctaaaatcttccgagcctcatcttcaaagactttctttttcatttctgggggctcgtctctgagaaggtaatctgttgtaacctcataataatcagcgagcttaatcagggtttcataatcaggctggcgcttatcctgctcatacatagcataagttgtcctagccactcctatatttttagcgacttcttcttgcttaatttccctattaagttttgagctctttgacttgcggagttcttttaatcgcacaccaagcataataaacgctcctttcctgattattataacgtcacagattgtgacaaataaactttatttcacaaaatgtgtattaagtactttacaagtcgcggaatgtgtattattatatgaatacacgatatgtgacgcggaggtgataacatgagaaataaaaataaacgtcaatggttacaaaagtttagacaagaagccaatttgacacaaaaagaagttgcggaaaaagcaaatattgcacggacaacctatgcaatgattgaatcaggagcacgcaacccaacaccgcaagttgctaaaggtattgcaggcgtgcttgattttagctggacatatttttttgaggattcatgtcacgaattgtgtatttcgaagacgcattctgcttaataccttgggtagtccatctgtccaacatgaatacactgtcgtgaggtgagcgcaatggctaaacaaacaaagactaaaacaacgaacatcaaaatcggcaaagagtattacggaacaatggacagagaagaatgtttccgtaaagctctggaaccttatttcacttcaaaaaaagacctgaagttaaacgcttaaaattttctgcttcacctttttttggtggacaagcaaaggaggccacaacaacatgaatcaactgcaaaacttctcccatcaacagtttggagaactgccaatcattcgaattaacaacaaagactatttcggcgcaactgaagcggctgaggcactcggctacgcaaatccacatgacgccatatcaaaacattgcttggaaagtggggtcgcgtttcacgaggtcaccgattcaatggatcggacacaacagaaaaaatttatcaacgaaggaaatttgtatcggctaatcgtgaaatcaaggcttcccgccgcaactcagttcgaatcatgggtgtttgatgacttgttaccaacattacgcaaaacaggccagtacggcggcccgagagtgttatccgatgaagaacagcgaatcgaatcgctaaaactcactttaagtacagcagaacaacaaaaaaaaatgcaaaaagtgttgttccatcatgaaaaacagatcggtgagctcagtcaaaaagtggacgagcagatcactttggattccggagaacagcgccggtttcaaaaagtagtcgcgcgccgggtttatagcatcacggaaggtaaggaagaagcggccaggcttttcagagaaatacaccgtgagataaaagaccggttcggcgttgcaagctacaaagacataaagcgcggggaactgttatccgcaatcaaatatatagaaaattggattcctcgaaaggtttcctaaagcctttcgagttccttcattaattaaattttaacagcgaaaactaaatatatcagggggcgaacatatgtcgaacaatccatacaatatggacaatttatccacccttcttagaatcgagcggcaaagggccaagctatcacagtaccagatggggaagatcatcgggaaaagaaatcaatcgtttatttccaacgttgagaacggtgtttttcctttaacacctgaattgtgtatcaagtggtttgaagcgtgcggcgcatacgaacatattgatctcgtacattacctgttccggctgcatccgacagcggcggcgccaattgacccggctcttaacgagagcgcaagcgcggcggtaattaacatgatccatcagcttgaagaagcattgcaagcaacacggcagttatcgcgctggctggcgaacgataggccgggccgacagtcggaagaactgccaatggctgatattaagcagattttcgatcttattccggcgaacaaaactttgatatattctctggtccgcagtcatggtttgaacatgaaggacctggccgacaggtggacgcgtaaggcgctcatgagtcaggttgcaatggcaaaacaagagggaaggcaggcggtgctggtgtgattgatgacaaagtgctggttaagcgacgtaacgcggccaaattagaaatgatagtgattgaagaatattcgaaaattctcggcaaatctttgataagcggtgaccttgaacaagcagataaagcatatgcgaggatgcagcaagcaagcgcgagactggaagattataaggccgaaaaaagagagtttcttcggatggtacaaccagttaagtatatgagtcctgcaactgctcaggaatttcaaaggaggtttttggttgatgcagcatattgaaaatccgatggttctgaacaactggcatgacaaggtgactgaaccggaaacaaaaaaggactttttcggggacgaagtaacgtcagcagataattatgtaatcgactgcggcgagataattctacaagacaatcttaaacgctacttaaaggagcaacttggatttaaatttcattcagcacaataaaaaaagcccactttgcagagtggacttcaaaaggtcttttggtaaagaaatgttcctttaattatacctaattacctgtctaaaaacaattagaaatcgggggagataacaatgatcaaattaaaccttgaaaacaatatcggtaaaaaagcgaattttgaagctgacagtttaacagctcgggaagcaagctcaattatccatcaaattattacttacatgaatgccgatgaaatgcctggccgcatccgtcccgaacaaatatctacggcagcctgtcaaacagcagagtctattactgctattcctcaaaaggatgacgtagaaaaaaacaccgataaggcaggcgcggcagatgcgagagaggcaacaaaaacagtgacaaatcggcttgctgaaaaagctgaacctgccgaaaaaatcaattcaagaccaagacaggttcaattgttgaacagtgaacgccgtttggcgacgccaattgttttccctacaaacgaaaagggggagcgtgaaaagtggaaaacaagattttcgtgcccttcatgtggattaagtgaaacaaaacacgtcccccaaggattccgttttacaccatgtgataactgcggaacgcgtgttcaaatcaaacctgcaaacgatgcgtgggggcaggaagattcagagggattcgtatacagagccaataacttctatgaagaaaaaaaagagggaagatacgatgcctaaaccagtaacagcatctttcagtgaccgagcggacgatcagaagcgtttgagacaagtcggcggctcgatcatgttcagtaaaggcaaacccgtattttctttcccatcaatggccgcataccgagaatggcagcaacttggtgcggaagcatacaagagaagggtggggctgctctgatgcaggctgagatatttgcaaaaactgcagatatgagccgtgaagaatggctaatggaaagacggaagggcatcggtggttctgatgcctccgtaatcctggggttaaacaaatggagaaccgcattcgaattatggctggacaaaacgggacaagtcccggtcagtgaatcggccagcgaggcggcttacttcggctcaatccttgaggacattgtcgcaaaagaatttgaagtacggagcgggaaaaaagttaggcgtaaaaagtccatgctgaagcatcctgaacatgatttcattttggcgaatgttgaccgaatgatcgttggagaaaaggccattctggaatgtaagaccacatcggaatacaacttgaaagaatgggaaaatgacgagatccctgctgactatattgttcaggtccagcactatcttggagtgcttggtcccgagtataaaaaagcatactttgctgttctgatcggtggcaataaattcgtctggaaagaaattgagcgggatgatgaattaatcgaaatgatattcactgctgaagtcgagttttggaatgctgcggtattgggtggggttgctcctgcgttggacggatcaagcgcagcagaagaatatctgaaaaaacggtatgcggaaacggaaagcaacaaggttattgatcttaccgcggtaaaccgtgaacggataaagcagtatttgcaattaaaggaaagtatcgctgaattgcaattgcaggcgaaagaattagaaaaccaaatcaaacacgaaatgaaggaagcggaatacggattcattggcaactatcaagctagttggaaaccggttgtatctaaccggatcgacaccaataaactgaaagagcagtttccagatgtatatgagaaagtcacaaaagaagtgcaatacagacgctttggaattaaggaggttagctaaatatggctacaaatgaatcacttaaaaataacattcaaaaacaaaataacgtgccagggcagccgcagggaacaacgatgaagggcctgctttcttcacctgctgtaatcaatcggtttgaaacggtcttagggaaaagggcgccccagttcactgcatccattctgagtctgtacacaagcgagaagatgcttcagaaggcagagccaatgtctgttatctctgcggctatggtggcggcaacgcttgatctaccggttgataaaaatttaggctatgcgtggatagttccgtatagcggtaaagcacaattccagcttggatacaaagggtatatccagcttgcgttgcggacaggccaatacaaatctattaactgcatagcaattcacgagggtgagcttcagaagtggaatccgttaacagaagaaatcgaaattgattttgaaaagcgagcatcagagaaagtggatggctacgctgcctacttcgaattactgaacggtttcagcaaaacggtctactggacaaaagcgcaagtagagaaacacaaaaagaaattcagtaaatcagattttggatggggtaaggattgggatgcaatggcgcttaaaacagttctgaaatctatgcttagtaagtgggggattctctcagttgaaatgcagaaggcagttatcgaggatgatgaggaacgtgagcgggttgatattactgacgaaatggcagagccggaaatcatcgacgctgaagtgtcagaagaaaagccaagcgcgcaggatgtcgatccctttgacggtaagcctgtagacattagcgaaaatgacctgccatttgattgaggttagcatacccttctgttacaagtggatgacagaaggggcgcctaaccgggcgcaactgttccgagattatgttcagggttatatccgaacaaatgaaccgggcttgcgtttagtccgcatcagcggcatgacagcactgtgtgaaaggaagtaggtgagcggcttggaaatgcaaggcatggggtatgttattcagccccgccagcagtttgcaaataggcgcgaaaagattctttatatgtgtttgctcgaagaggccgttttcgctcccgttggatcattaaaaacaggtgaagcaatgattaatgtggcggagcttgcgagggacctatctattgatcttaaaaaaatgcggtactctctcggcaaacttgagacagcaggattgatcaaaacaagacgaatgaagcagaacaaagcaactattatcacgattgttgattatgagaagcttcaaaacataaagaattacgggaagaaagcagattcatttccgccagtggaaaccggggattcggaacaagaacaaaaaaagggtgaggacatgcaagaccaaggtaaattcaaaaacattcctgattacgctgatcacttaatgccgcaacagatcagcaacgaagacacactaaaggacgctttaagtgcagcagaattaaaaaatatgaatctggcgagtgaaaaagaaattgaaaaattcgctgatatggttattaaaatgggcgcgcttccggaaggcatcaaaaaaggcatacttgttcaatatcttgactgcatccggcttacacgttcgcattgcaaaatttccgcgaagttgcttgcgaaccatattgaaaaaatgagtaagtacagcgtcgatcagcttcattacgctatgtgggagcatgccgagaaatacgacgaccgcaaagaagcgtacacactcggtattctgcggggaacgagtgaccataaagcgcggcagggccttatgaaattaatgaaccggggaggacgaggaaatcatgaacagtttagcaaccgccctaaagcagttggagaaagccaatccacatctagcgcagaagttgaaagactcgaagcgcttgcccgtgaaaagggcctctcaggaaagatacgagacactcactgtgatttctgaggaaaactgcatttataaacaatgcgacggctcagggctcatatgggtgaaggatcacaaagaaaacacggagtttatgaaagagtgcccttgtaaagccattaaggcgctagaaaataaactgctcagcgcccggctaccggaagaatttaaggatgtcactttaaactcttttgaaattgatgtttacgatcaggatatttctaaagaacgggcagccaatgccaaaagggcctcaaaaaactatgtacttaaattcgatatgatgcgcgagcaaggaaaaggactttatttccacagtcatgagaagggcagcgggaaaacgcggcttgctgcaagtatcctaaaggccattataaaaatgcatgataagccggaaagccctatgaagattctttattcatcaactgctgatctaatcggtgaaatcaaaaaaacctttgatggagaatcaaaggtgaaaagctcggacattatcgaggctgttaaaacggctgatcttgccattctggacgatataggcgttgagaaagtcagcgattgggttgaggaaacgttcacacgcatccttgattacagactgcagaataagaaaccgaccatcttcacaagtaatctgagcattgatgaattagaccttaaatatcctggagggcgtatcagtagccggattgagaaaatgacatttccaattcgtatgccagatgaaaaaatcaggagcaaaaaagccaagcaggaaaatgatctactgctccaatcattatacgaataggagattgctatgaaagagaaaacaaacgttacgatatccggcggcatgtatctgttcgggcccgccgagcaaacggccggccaggaccttaccccggcgatccgggtgcttgaggaaaaaatcaaacaaatggagctgatgcacagtgcttaaagcggttatcctgctgccggccatcatcctcacagcgccgtacaaggaaaagcagattcagcactgggaacaaattgacgggaggtaacgacggcacgcgggaacgggtcgataaggaaatagtcagagatatggaggcatcacatgcaaacgaataagtacggcgcaaggaaaacacaggtggacggcatcacgttcgatagccgggccgaagccaaatactatgagcaattgaaatggctcaaggtaagcaagcagatcaaagattttaagctgcagccgcggttcctgcttcaagaggcattcaaaaagaacggtaaaacttttcggaagattgaatatattgcagactttgaggttcataacttggatggcagcatcgagattattgacatcaagggtgtagaaacaaaggaatttaccatcaaacgcaagctgtatgagcggctttacgatacgccactcaaggtgctggcgctggataaggcattcggcctcattgagttggacgagctgaaaaaactcaaaagaaaggcggggaagaccactgcaaaacgtggtaatcgcagacgatcggccgttgtgggtgcaggaagaagataagctcatggcctgcatgcgctctgttccgattacaaatgcgtcagccgcatgggagcagattgcaaaaagcttggaggttcagaaattcccaaaatcaattcaggaggttattgctatgcaagaaaaaatcaatccatataaaccaggaccggttaacgaatggaagatgacaccggaggagctggcggcatacgtcgaaaagcatccaatcatctaccgtgaggaattaaagccatctgccggcgtgacgatgcggttgccgtcgtaaaacgcaaaaaagcaccgaagctgcgcctcagtgcccttgatatgaactggtacttctatcatagcacagggggcggccagagtgaacaagccaacagaaataaaaaatcatgaaacaactattcagcaaagcatcgagccggggaaagtccgcatcatcgttttagatggcactgaagggactgctcatctaatggacgccccggaacacggtaaaacaatcattcaaacaataaaaggcggcctggctcgttgtgattacgagatcggccacaaattcaaatagcaggggtttcccctgtgggggaggaacgggcatgaaagagagaattgagtggttaaaagggcttacgtatattccgcaaaaggaaatggaatggcttcttgaacaagctgaactgactgttaagcagcaggaaatcatcgaggaaaacaagcgtcagcaggaagtcacggtcaatcagtttcggcaggctcaggaagatattaagttgctgcaggcggagaacaggcgttatagaaacgcattagaattttacgccaatgaaacgacgtatacaaacgaatttgaagactgtccgccagctgtcgaactcgacggagggcaaacggccagaaaagcattggagggggctgcggaatgaaagtatggcattcaagctcaacagaaacaaaaccttgtgttttgtgtaataaaaaaactggcacttataaagtttatatgcaatcaaatatttcaattcgactccctctatgtgattgggaggacaggaagtgttatgacaaggttgatgttaaaaatttggctgatatggcgttgcgtttgatcagcaaagaagcaaaagaaggtgttaaaaaatgatgccattacaagtagaacttcaacggaacgtgaaggccacgaaggacgaagcaatgaccgtcgagcaggcggccgagcttttaaaggttcacccggactacatcccgacgcttgtcgctcggtctgacgatctgaaaatgatcggcgatcataccattatcgctaaacgggataaaacaaatatctggctggttggggcatgcgtgggactcttcttcttcactatctccgtgctaccgaatttgatcgggtgacgggatgaaaggtattgaattgttcgcgggcattgggggaatcgctctagcagctgaatgggccggcattgagacagtagcattctgcgagcataaccctttctgccagaaggttttaaataaaaattagtaccgaaaacgggaattacatttttcagttctgctctagatttagcccccagataataatcttgtaaaactgcttggggtgatactgattcgtgatttgtactatggtttgtaggacttgcagcaaaggcaggagcagcagaaacaagtagagcaagggacaatgcagaaccagttaaaacttttttcaatgtcattttaaacactccctttgtttttaaatacaactgtattataacacataaatacccaaggtaattattgttaatattttgtgaacttagttgaaataaagaaatccgcgcagatgcctgttgctctaaatgcggctgcgggcatctgggcgttgaggaggagattataaattgataaaataggatgattaggaaaatattgagttaagggagtgggaagattgaaatggagaaaaatttaagtgaattattaagttattttgaagtgccgagctacgttatttcgctagtaagtatcgctttgtatctgattagggttttacaccccattactcttttttcttcgaatgttgttgagcagaaattgttttcaaaagaacggttgtttttcgtagttgtttgtaaatactttgcttatggattatattttggaatcttattcatttgtatatctatatcatttaataacaggtttggttggacttataatgaagtagtaaatggtgtttcccctatatttatagcattaataatatttttttcattaatagctaacgaaactcgaaacacagaaaatgttttatttaaagcaaggtctaataagattattaaaatactagttttcttgctgtacttgattgctttattcactttttatatcaattctgctttgttgatatattttgctgagtatgagaattcaagatggcaaatatttgcgttattaattttctttttaatttgtgcagctatccctttcatttcgattcctgttataaaattcatgaatggatcaactaaaaaagcggtatatataaaagataaaaataacgagaaatggtttatattacatccaataaacaaggatatcgttttattgggggataacagcgatcccaaaagatgtgaaaaaactatgtttaaaaaaatagaagatatatataatgaaccgatcacactaaaaatagaagataattaagtccaagacggaaagcctgcggacactaaacccacagtatagcgctgtttgtttggcgtccgttttttatttcatgattatctggatatgaatcagatacctataatggaaataaaaaaacggtttatcaatgagctgaatcgctatgctgactccggaaagcggaactacacgtaacattcgaatcagcaaaattcattgtgaagtaagataaattcaaagaagaatcggaggaaaatacaatgctacaattaacaaaagaacaggctgcggcttttgagagcctacggaaaagcgttagcttagggaattggcagggagaatgggccccgttaaacagcgttgatcctgtcgcgcttgcaactgccctcgctaccaacgaatatcaaatattaaagacgcctgccgatgaattcgaagaggcttttgacgcaattcgagaagaggctgaaaccaaaagccccgaggccacaagatacttggatgaagtgaacggtttttgggagcaatataaagagaaagccggcctttaatggtttggtaaccctattgaacccggattatggtaaaatataagcatatgaagagttaaaaatgcgcctgctggcattacgcagccaaggagcttaaaaataaatacgtccaagacggaaagcctgcggacactgatcattgcacagaattttttctgcgctctggttggtgtccgttttttgttatcaggagggatgacatgaagcggaagaaaaaggagccagataaaaacgtttctgagcgatcagatcgcttttggcagcggatgatgggacaaaatatgcaaactctgaaaagaggcaagggcggcgctttaaggcgcaaataaagggagtgtttggtgtgaaatatggattcgcctatcaaaatgggaaaatcgtgaatcttttgtgcggaaaagaagatttatttgagaatatgaaaagtttcttgatggaaaagtgcagcctaacaattcaggaagtaactaaaactgaatatctggcagaacaaaaaaagaacggttggaatgagaaatattctatttacggacaaaaggagagttataatgtctgatcaaatgatggcttgggaaatcgaagaatggattcgtgattataattttatgctgcgggagatcagtcgattgagccgcattctcaacaaggtggagtttgccgggcagaagcttgtggctacttacggtgacgaagcaggaatgccgcggggatcagccggaataagccaggcggaattacgtcagatggatcgtcgtgaaaagcggctccgtaaatatgaaacaatcgttgattttcttgagcgctctactgaagaaatagaggacgaaaaaaaccggattgtctttgattgcatgttagaagggatgaagtttcgtgaaatcgcgttgcatcttggcgtttcccgcgaaacagtcagacgcattaaaaatgatattgtttgccatttgtgccaaatgtgcgaaacgtgtcagcttttgcaattgttgaatcagataaaatccgcagtgtaaactggaaggcaggatggggaggcgaaatattcctgcgtccccaccaatttcatatagtgaacataaagctcttatttcgtatagggctttttatttgtttctaaaaaatgtctcttgtttgccgatacacttcataggtgatgattatgaaatggagtatgattagcaagcacatttttttctggagaagaaaaatagaatataaaaaagcaaaaagtgtaactgtttatttgcaaaaaaattacggaaaggcttataaaaaaaataacggaaaacaggataaattcaaacagaaagttacgaatgaccattctcttgatcaacttattgaaatgtccaatcgtttaaaagcaaatagaaaagttgagggcgatacaagaagtttgatcagtattccttttactattttgttatccgtttgcacggtgacagtaacaatctcaaaagcaatgattgattcaattactaaagacactactgttgtcatgataagtccaaatttatattcagttctcgtatatgccatttgtactttttttattttaatttttgctttttaccaggtaattgagtctactacaagaggaagatcagcaaagtttaatcttattgaggttcttattgatgagtgcattgaaaaaaagaaaaaacattcgaaggaattagcagcgttgaatgaaaaagaatatggtttcatgaacttaaataattatagtgatattaaaattcatgaagtttgcgaaacatcaaaaaaaataattattattaaaaaataatcatcttttaaatttttttgtaatgtgaatgccaccatttatgaagggcgctttcgttcgacaaattttgcaaagtgtggacttattgttgattctttcccatatttaatatagagggggagcgctatgaactttgaaacaaaacatttaattcgttggggaatacctggttggacttttctaggtgcattaacaatttacttctacattaaagaatcagttttgaacagcgccttttcaataagcaagataccagctttcatgtttactgcaatttttgtaggtgttggaatcataatcggacatctaatccatcagataagcatgttatttggctttgtgatatggaacaaatggtctgattactttgaaaaagaattcaagtttgatcagtttattatggaggatgaaaagggtaaagaggtacagcgtatatatagttataggttggggaatgtacatgctttaaggtctcttaatattagccttataatcgcgttagttgcaacggtggttttgagtataacaatgtatttttcatcaaaagttcttttgttgattgtcatcttgtttttattagtggttataacatttattaattatctttatttcaaaaagaatttagaattttttattatgaaaattgaatcaataaacaacaataattaaccgtagtgttcgacaaattctgcaaattgttcctttctcctgctccttaaccgataataaggtggggagggggtgatgaaaatgaagcatcaagagaagtatagactttcaaaaataatacaaaaattaattgatgaggacattgctttaagaaaagtaaccaatactgtatcagaagaatttgaaaaagaaagaaccgaggaattacaagggataattaaacatctagaaaaaagctcaaaccttttaaaagaatctattaaagaaattgaacaaataaccttgaagtaatagtcaccaaagaattagagtatttggagctgaataatttgaaccaaattaatttacttctaagatttttgcttgaagttgctgcactaatctttatcgggttatttgcttggagtcatttcaatggttttttaaaatatgttctaactttagtattgccgatagtagcaatgctaatttggactgtatttgcagtacctaatgatcctagccgaagtggtcaaactgtaatagccgtaaatggagttataagattgattattgaattactgatcttcgcaatagctgttacggcgatttactttagtgatttaaaaacagttagtattatctttttttgtctaataatactacactacatagcttcagttgaacgtataaaatggcttctaaatcaataaagcatagcaccctttatagggtgctttttatgttctctgtaaactgattccggtaaatctcagaaaaacaattggcggttaacggtctgagtgcggcgtcggtttagagagaatatctttttccaaaacaactcaattcaaaaggaggcggcggtggatgtagatggctgaaaagcacattcaggcgtataaggattacgccaaaggcatgaaatacaaggaccttgccgaaaaatacggggtgtcagtaaacaccattaaatcatggaagcagcggcatggttgggaacgaaaaaagggtgcaccctctgaaaaaagtgtgcacacaaaaaaggcaggcgccccacccggcaataaaaatgcattggggaacaacggcggcgccccggagagaaatcgaaatgcggtttcgcatgggtttttctcaaagtatctgccagaagaaacgcttgaaatcatggaagagattcaggagcgttcccctgctgatatgatatgggatcagattcagatacagtatgcggcaattattcgggcgcagcgcattatgtttgtacaggatcaggatgacactacgaaaattgtttctaaaataaaaggtgacctcagcataaatgaggacggcagtctttcaaaagctcactttgtggaagagttgcagcacgatatacaattcgcatgggataagcaggcggcattccttaacgctcaatctcgggcaatgggggagctccggagcttgatcaagcaatttgaccagctggcgcatgagcaagatgagcggcgccttaaattggaacaaatgcgcttgaatatcgagaagaccaagaaggctattaacggcggcgacgaaaacaccaaagaaaatgagattgctacaatgttgagaaaaatggtggatgccgatggaactgaataaaaagcaaaaggaagtttgggacagcttcataaaagagcagcccaaaattttaatttgtagcggcgcaaagagggcaggaaaaacattcgtgctccttttggcgtttcttgctcacgtcagcaagtatcaaaacatgggattgaattttgttattggcggggcgaacctgggaactatcaggcggaacgttctgaatgatttagaacagattctcggcaaggaattgaaactcaataagtcgagcgccgttgagatattcggtaatcaggtatattgctttgacggagcaaacgcaaattcatggaaaaaggcgcgggggttcacgtcagccggcgcgtttctgaatgaggcgaccgccctgcatgattcatttgtaaaagaagtcatttcccggtgctcttacaaaggcgctgtggtcatgatggatacaaaccccgaaaacccgatgcacaccgtcaaaaccgattatatcgacaaagacgggcaaaagttgaagagcggccggctgaacatccgatcatttcatttctcgctgttcgataacaattttcttgatccggagtatgtggagagtatcgtggcatcaacaccgagcggtatgtttactgatcgggatataaacggatattgggtggcgtctgaaggagtcatttaccgggacttcaataaggacattcactatatcagttctgaggaattggagaacaggcgcgtcaacttcaagaagtatttcgccggcgttgactggggatatgagcacccgggttctattgtcgtaatcgggcaagatgaccaagggtgtttttatttgctcgaagaacatgccaagcagcatgaggaaattgactactgggtgaaagtagcgaaaggcgtaaaagagcggtacggcaatattaatttctactgcgattctgcgcggccagagcatgtgcagcgcttcaggcgggagaagttgcgagccttgaacgctgataaggcgatcgtatccggtattgaagaagtggcccggctgtttaagcgaaatgaattattcatcgtgaaagacaaggttgagcgcttcaaaaaagaaattttcatgtatgtatggaatcccaagaccggcgaccctgtgaaggaatgggacgacgtgctggatgctctccggtacgctctgtatacccacaacaagccgaaactcagaaagggggagtaaccaatgaaggaatatataaatctaattcgtcagagtggaatcaacggcgacattatcaagatgatgattaatgaacacgtccctgtccgtgaaaaattgatgaagctatatgcaagatataaggctgatccggcaggcgttcccatattaacacggtccatcattgattatggcagcgcgggaaccgataaggtgcagcgtattgatgacaaggtaaacaataagctgaacaactcatttgactctgaaatcattgataccaagacaggctatatgtttggacatcccatttcttatgaaaccgaagataagcaattaaaagatcaagtgagcaccttcaatacgagaaataacattgaggacgccgattccgaactcgggaaaatggcttccatctgcggttacggcgcccgcctgctgtttgttaatgaagacggaaacgaatgcctgcgaaacgttgatccgtgggaatgcattattctcgctttagacgatataacagagcccacatatgctttgcggtattattcagtgtttgagtgggcgagcggcaaaaaagtcgagtcatatcgggctgatttctacgatgaaacgttcatttattcgtttaagtcgtctgataaaacgaagtacgatcttattgagacgaagccgcatcttttcaatggatgcccgttgtttggtgttccgaacaataaagaaatgaaaggcgacactgaaaaagtcatttcgttaattgatgcatacgacagaactttgtctgacgcatcgaacgaaatcgaacagttccggcttgcatacttgattgtcaaaggtgcttcactcgatgatgaggatatggaaaagctaaaaaagaatggtgtgtttgaagtcttcgacgataacggtgacgtgaaatttttaaccaaggaaataaacgacgccatgattgaaaatcacttgaaccggctggaagaaaatattttacgatttgcgaagacggtcaatttttctgacggctctttcgggggcactattacaggcgttgccatgcggtataagcttatggcgttggaacacaaggcaattaccatggaacgcaaaatgacagcggcattccggtatcagtataaaatactgtgctcggcatggtccaaaaggatactggccgacaaagacgcttatctgaaactatggtttcaattcaagcggaatcttcctgcaaacattctcgaagaggctcaagcatccgcggaactcaaagggctggtaagcgaagaaacgcggcttgctctattatcgttcattgatgatgtgcgttttgagattgaaagaatgagagcggaagaagatgcttacacaattgatgataatcaggatgacgatgaggaacaggaggtgaatgaggatgatgaagcttttcaaaaggacgaaagaaaaaaacagccgtctgaatgaagagtttaggattaattctttgttgagtatgctggaaaacgaaaacctgctgcatgaatctgaagaaatatatgctgaagtgaaaaagtctctgtttctaaacaggaagaaacataacgtttctgactaattgagcagcaagctactcttttgagtggcttttttttatgcctttttttcgcgttgtaggcgttaaagagcaaccgaaatacttttgaacttgttaggggcttcggcaactgataagggcaaggaggacacacagaaatgaaacgattaaacacggataagtcagtcagtccgtcaatgaatttcatgaaaaaagaaaggctaccactgcgcattaaccttcagcatttttccgaacctgggggcgcggctgatccaacaccgggagcccagccagcaggcggaaccggtaccgatccggcaccgcagccgagcggcggagaactctcgctggatgcagtacgggctttcctagaaacaaatgacgagggaaataagctgcttcaatcaacatccgatgcaagggtgacagaagcgatcaagacgtatgagaaaaatacgttgccgaagaaacttgaggaagagatttcaaagcggtttcctcctgaaacagaggaacaaaagcaattacgtgagttgcaggaaaaattccagaaccttgagcaagagaaaacgcgggagtcgttgagaaatacggccctttcaattgcaacggaaaagggcttgcctactaatcttgttgacttttttatcggtcaggacgatgcgaccacagaacaaaatttgaataccttggccgaagccttcaagacttttgaacaaagcatcgtaaacgatcatttcaaaaagaacggtagcacgccgacaccatcaggcggagcatcagccccgttaacagaagaagacattaaaaagatgagtgccgaggaagtcaatcaaaactgggatcgaatccaagctctttataagaatcaataggaggataaaaacacatggcattagataattttattccggtattatggagtgcaagactgctgagcaatttacaaagaactttggtttatggtcaaacgggagtcattaacagagattacgagggagaaatcactgctgctggtgactctgtgacaatcaacaatatggggcgcgttagtgtgggcgactacactaaaaatcaagacatggataacgcgcaaacacttgattctacaagccgtaagcttctcattgaccagtcaaaatatttcaactttcagattgatgacgttgataaaattcaacaaaatccaaagttgatggacgcggctatgcaagaggcagcatacgctctgaaaaatactgctgattcatatattgcttctcattatgtggatgcagctcatacgatcggcagcgatacaaaagttgtttcaccaacaaaaaacgacgcgtacgaatatctggttgatctttcggtgaaattggatgaagcagacgtgccggaacaggggcgctgggtagttgtaacgccttggtatgaaggattaatgctaaaagatgaccgttttgtaaaggccgggaacatgtcttcagaacaacgccttttaaatggtgttatcggacaagcggccggattcacggtattaaaatcaaacaatgctccactttctaaaccagagggtggcacagaaaatcataagattattgctggtcatggcatggcgtggtcttatgcagaccaagcaacccaagtcgaggcgtatcgccctgagaaacgttttgctgatgcagtaaaagggcttcacttgtacggcgccaaagtaacaagaccggaagcgctcgcggtattaagcgcagcccgtccacaataggaggggcttttttatgtggattcaaaatactgataccggttcaacttggtttgttgaggatgaacacggtaataagcttttgaaagaggacagatacaaaaaagtacagtcgcccattaaaaaagctgaaaaaaacagcaaaaaggcagcggacaaaacaacagatgaagagaatcaagaatctgctgacgctggtgaaaaagcatctgacgaataggggggatagcggtggatatagaacaaactgaaaaagagcttttgaagccgttaacccgtaaaatgcaggagtttttacggaagctgaagcggctttttcgtgggacttccgaaaaaatactttccaaattgactgccctgtttgtcaagcttgataaagggcgcgaaatcagccttgctgacgcgaatcggagtaatgatctttctcagattaagaaggatatagcatcattgattactgccctttctgcaaaggttaaaacggctgttcttgattttctgactgaaacctatgagtcatcgtataactggctcatgcttggtatcttatcggccgtcggctttaaattgtcccgttcatcgaaagggaaattgcctgtcgcatgggcggcgcccgcgtcaatctcgcagactatcacaagtgaaaatatgctcaaagcaatcgaaacggaccgtaaaaagacagttcagaagatcaatcatacgattgaacgcggctttattgagcggaaacgctttgttcaggtagcgaaggaactgcaagctgatgtgggtgtcagttataaccgtgcgcagcgcattgtcagaacagaaatgcatcgagtgcgggagaaagctacactggacgcagctacgaaagctgattccaatggtattgccatgaaaaagatatggcacaacatgggtgacgagcgggttcgtgagggaagaaacgcggatcatgttcatttagaaggccaggccaggtttgtaaatgagctgtttgacctcggtcaagataaaaacggcaagtctgtgagggcgccggcaccgggacaaagcggagatccttcaaatgatataaattgcaggtgcttcgcgacatatgaacccgtgctttgaaaggactgagagaaatggacctgtcagaattaaaaatacgattgggaatccccgaggatgacacctcgcaggatgcaaagctacaaattgaccttgaagacgcaatttcttttgttaaggaggattgcaataactcttttgtggggccggatggagttgaattattaccgggccccgtgaaaaaaggaattgccctcatgattgaaatagaccgggatagcccgaaaggcgtccaggctgaatcaattggcggaatgagcaagacatacacggcggatgacgtaaggtataaacccgcgtttgatcttttccggccatacaaaaaaattcgttttaaaccattgaggtgatcagatggggcgccgaaatatccgggtgagggatacaaaccgtataccggaattactgaggaaccttgagccaaaagggaaaatgaaagtcggtgttctggacggcgaccgccaaatgatcgcggctgttcatgaattcggctgccgtattgctgtaactgatcgcatgcggaattatcttgctgccaaaggtctttatctcaagaaggatacacagtttattaatatccctgaacggtcattcttaagggctggttgggatgaaaatgaagccgagattgtacaaaaggtagaggaactggtcaacagagccatagagaacggcgattctattaatgacatcatgaacgcggtcggattgctggcaaagggccggctgcagacgtatgcaagagacttacggagccctgccaatcatccttttacaacggaggaaaaaggctcttcaaatccgttagtagataccggggaaatgatcggttctatggattacgaggttgaaagctaatgaaaaatcactttcagttcggtgatctgattgagaaatacagcgttgattttacattgttgctcccggcgtctgaggggttttatgacgatctcggaaaatgggtagagggcaagccggtggaatcggaagaaaaaggcgctattgtcccattacaggcgcaattaatttatcaatctggcggacggcttacgcagatggacaggcaactgtacttccagaagaaaatccctttcaaggctcaagtggtttttgatggagtaacctttttggtggaagcaatgacgccatacgggacatacgccgatttcaattcctatatcttaaaggcggtgagcaattcagatggattacaacagcataatcagaacggttctcagaatgattaaagagaaaaccggccatgtcgttatcgaagcaaacgggacaggtaaacagcctgaataccctttttgcacgtataccgttacttctccgtatttgccgcaacacaggggtgttgaggaacaaggagtgttaacggaagacattgagctggttttttcttttacatggatttcaaatagtcacattgaagtcatttctcttgctcaagaaacagcctcttacttcaaaactgctgacgcgcgccagacgcttcatgacaacggcttggcgtgggtgagaaacgacggtttcggtaatcgggatacatttatcacgatagacacagaacgccgtcacggctttgatatgcgtcttagaacgcgagcggcttatggagagacacaagcggagttttttgattccgcacaaatagaaaccataggaggttaaacacatgccacttagtgatgtaacggtcaaaatcgacctggtgaaaccgtcgaatcttaaaggattaggaacacccctaattcttgcgaaggttgccggacacaacacctataaagaatatggctcaatagaagctgtcaaagcggattacccagaaggaacacccgcatataaaaaggctgctgctatttatgcacagggcgacaatgccccgtcaaaagtagccatcggtacttacggaggtaaccccgagaacggggagagcgacggagcgggagcggctgccacatttacgattcggaatgcttttgacgagtattttgataatgattggcacttcctcattcttgctgatgcgacggcagacgagaagctggaagcagcaaaggcgatggaagaaaaatcatacaaattcctcgttctgcaagtaacagatcgggaagaagtcacttcttataccgggaaggaccggacaatcgttttttatcacccgataacaagcgagcatccggacgccgggctggttggtgccgtcggctccctgacagtaggttcagttacttggaagttcaaaaacattgtgggcgtcaccccgcaagacctgaaagcggacgagctgcaaaagctccacaaagagggagctatcgcttatgtgaccaaagcaggccacagcgagacgtcagagggaattactgcttcaggtgagtacattgacgtcctgcacggcaaggactgggtgaaattaaatattgaaacatccattcaatcggcattctcaaataacggtaaaatcccgttctcgaatgccggtttttcattgttgagtgttcaggttacgaatgtacttcaaaaagccttttcaaatgggattgtcgcttctgatgaagacggcttgcccgtttacaccgtcagcacaaaaaaacgctctgaagtatcagacgagaacagaaaaaatcgcgtgtatgacggcctttctttcacgttcgaattagccggcgcggttcattccgcctccattacaggcgaaatttcaatctaaagggggagaatagtcaatggctgcttatgtttatgatgcgaacgaggtcaacacgaatatcgacggaaaaattgttactggttattcagagggtaccatggtttcgtgtgcaaaagacgaagaaaagttttcaacaaaagtcagcgctaaaggtgatgtgagtgttgcaacaaaaaacaatccgctaggtacaattacgcttactctgtccatgggttcgccgtttgtgccttatttaaatggattggcgaacacgtccaaaaaatttcccatctgggtaactggcggacaagagaaaatcggcggcactgaagctatggtaaaaaagcctgctgatgcagaattcagtgacgaaatcggagatcgtgaatttgaaattcaagttttcgattatacagttttagatcagtaaggtattaatcatgtcgaaaagaaaaaaatcaaatgcaaaaaagcagtccactagggctgcttttcaatatatgcaaaccaaacaatcggagggaaaacctatgtcaaaattcggtaaacaaaaaacagttaaaatccaaggaatcgagtacactcttcagcacccaggaacaagacggatggtagaaattcaagatgaagcaattaacattaatacaggccgcccaacttcttcacaattgtatgagctgtacatgaaagaagttgtggtaaatccgaaagtaaacttcgaatacttcgatgaacatgctggattcaatgaattaatgtatgaggtttctacctttcttagcgatgaaaccgtcgaaaccaaagcagttttacaaaaagagggcgagtgacaactggcccatgtatcggcttgtgatgtctgagaagttttctttcacagaggttgcagcaatggacctcgatacattactcgaagccaatgcggctttggacattcatctggccgaagaaaacaaacgaaacaaaaagaaataaggggggttaaacgttgacagacgccttgcggagtacgcatattgatgtggaattaaacgttgatacctcccctcttgaacgagccaaccgccagattgatagacttgttgatcatacggataatgcggccggccatttttctcaaatgcgaacgcaaatgtccaacatgcacagggagcagcgaaggttcaggaacatgagtatgattctggacagttcttctttacaaactgctgcgcggacaattgagaatctcggccccgcatttgaccttatgacgtctcatgtggaaagcctaaaccggaccattcaacaaacgaacagattagtgcaaaatataccgtcacgcgtgagcatcgacgttgaccaatcatcattgaacaatgcaaatgatcaagttgataggctgcgaaacaatttgcaaaatgtggacatgcgccgggttaatgggggatcatcacaaaccgcggcggccatgcctgcacctgattacaggggtatgcgttattacgggcgggaaatggactttttgcgcggctctacacgcggacttgaagcagatactattcaaatggtcaatgaaatgcgccgggcttggtatgaggaaagatacggaatgaacggtttccgtaatgagcttatacgggcaagatatggcttctttcagttaggccaagaaatggacaactggaccgggacaaatgaacagttcatggatgaagtgtacaggctagggcgtgagcataaagcggttactgacaacatgatcaagaataataaaatgatgcgcatgagtatgttgcagtccatcggaacgattatggcaatgtcaacacaatcagaaaagatcgctgccaattatgacaggatggcgaacccgttataccaagtcaacaaagcggggcttgccgtctcaaatacccttgaaaatatggcgaagcagggaactgcggcacacttggccttgaagatgctcggacctactgcaaatatgaaacagcttcaagatatgacagccatgataacacaggggtatatgcgttttcagatggtagcacttggcgcggccttcacaaactttttcctattccaagggttgcataaggcagccacacagaccgttcccggttattcaaaggcttgggaacagatgtgcagcactcttttaaaagcaattcagccagcccttgaagtattcggaaccgttgccatgtcaatttataaaggcgttaccgcgatcggaaaaatgattattcagttcaacaaagctcatccggtgctggcgaaaatgatccaaggatttttattgctcatccctgttttaaccctgcttttatcgcctttggcaataggagtggggttatttaatgggtttctcggggctctgagcagtctttggatgttcattggcccggtagtaacggggcttgctgccatgtccggaacagtctatgtagtcgccggatcaattgtcttgcttgtaacaggcatttatatgctttacaagaattttgacaagcttcaagagcgattgaaaccggctacggatgccatgaagcgctttgcggataccggaaaaactgcggtagttagtgccttccataccatgattaaagaggtgcaggggcttaaacctgcatttatgaaaggatttgaggattcacaaaaggttgctatatccgcaattcataagatgcaagccgaatccttaaaattatgggatcggttgggcgagtcacaccctcatttagtcgccgggattgaggctgcttacaaaacggctgttgatactgtttcctcatttgttcagaatgcaggaaaacgagtaaccgactttttcggaaagggattaaccgaagggttgaacagttttattaaaggcttcatgaatcaactcaagattggtttatcaagttttcaagggattgtgtcaataattgcgcctataattgcgtcgattggcctttctttcttgggagtatccggaccgataggaatagcaattggggcgatcctcagttttgtagggtatttgtatcgtttgaaagatgcaaaccaagcggtcagcagtgcaattcattcggcgtgggcgactgttcaatctgtgctgacaacggtattcacggccattcagccgattatcacgacaatacagcaggttttcagtcaactggtagcacaactgacaccgcaatttcagcaattagctggtcaaatgcaacagacgttcattcagcttgcaggaaatcttgttcttttagccgcagccgtttcacaaacactttcaacgatcggcccacaattgattccgttgatccagcagctattaactgcatggatgcaggtatcagggcaattaatgacgagtgtattgcagattgtcagttcaattttgccgttacttgttcaagggtttcagactgtttttccggtcattctcagcgtgataaatgcggtcttacctatcatcattcaattagtcagcagtttttcaggggttatcgttacgatcattcagactgttctgcctatcctggttcagacaattcagatggtctttcctttgattatgaatatcatccagcaggctctgccgattgtggttcaactgattcaattactcggatcaacgatcggacaaattgccatgcaaattctgccgttgattttaacggcggtgcaacaggtgtttccgatcatagggcaggtcattctggcggtcctcccggttgtcgcccagcttcttactttagcagcaaatattattttgcagcttgcgcaggcggctttaccaattttaattcaggtggtccagcaggtctttccgcaaattgtgcagatcattcagatggtgctgcctattgttgtttctctactgcaagccttggcaaacatcattactacggttgtaattccggcgatccgtttcatcctaaatatcgtgactgctgtgtttccggttgtgctctcgataattcaagttgcactaaaaaatatcattgcgatcatacagggtgcaatcggcattattatgggaatagtgaaggttttcaaaggcttattcactgggaatttccgcatgatgtgggacggagtgaagcaaatcttctctagtgcagtcggaatggtgaaaaagcttgtaagcaatatgggtgcagcaatcactgacagatggctttatataaaaaataaagtcgcgttattggcatatgatctgcgtaagaaagtcatggatcgtttcaacgatttagttgacggggccaagaaattaccgggcagaatcggtgatggaattaagaacatggctcacaaggctgtatctggtgtgactagcttagcgaacaaactttccggcgcacttggaaaaggcgtaaacggtgtaatcggcggagtgaactgggtactcgataagatcggtttgaaagataagcatatcccaaaatgggaagtgcctaaatatgcacacggaaccggaggacacccaggaggtccggcgatactgggagacggtaaaggggcaaacgctggccctgaaatgtatcggacaccttcaggacaagtagggctcagccctgcaacagatacactgatgaaccttccaaaaggcactgcggtcttatctgcaaaacagacaagggctgcattagcgggagttccagcatacgcgaaaggcacagaaggaaatatattcacaaatgcatggaatggtgtaaaatccgttgctggcaaagtgaaagatgttgctcttgatgtttttgattacatcgggcacccctctaagcttttaacaaaagtgttagaaaaaatgggtgtctctgcaccttctatggctggctcgttcggtgatctcgcaaaaggggcttttaactttgtcaaagataaggctgtaggttttgtcaaaggcaaaatgtccagttactctgccagcttttcaggcggcggctcgaaagccgttaaaaagtgggtagctcaggcgctgtcaattaagcatttaggccctgaatacgcaggggcactcgaaacaatcgcaatgaaagaatcaggcggaaaccccaatgttgttaacaattgggattccaatgcgaaagccggccacccgtcacaggggttaatgcagttcatcccaagcacctttaacgcccataaagaaccaggacacggaaatattaaaaatccagttgatcaaattctagcgtctattaactatctgaacagcagatatggcggtatcatgaaacatcccggcttggtatcaatggcgcacggcgggccgtacagaggatatgcaacaggcggcgtaatcaatagcccgcaggttgcggcactcggggaaaacggttggcgggaatatgtcatcacgactgaaccgcgttaccggaatcaatcactgggaatgtatgctgcgctcggcaaagagcttggggctgaaactggatatacaccagaaaaagcagcaagcagcagcggtggaacgtctgtaaatattacattcagcccgtctatcaatgtaaaagttgagggcggaagtgcaaaagttgaaactgatatttcaaaggctatcacccaatcactggaagactcttacgacagcctggcggctctttttcaagcggagggggtttattaattggcgaagcttgggaaggtcaatcttgttaacgaaaaagaatcagacggggcggatgtggaagtcacatcttatcccgttgaaaaaggcgtgccgattaccgaccatgtgcagagaaaaccggaaaccacaagtgtttccggttatttacttgggaagacggcaaatagcgactatgaatatttaaaaaagcaagcatatgccggcaatctcctaacctataccgggcgaaaggtcgcaaaagacgtgatcattacgaaaatcgaccgcgatacaggggaattttcaaacgggtttgcgataacaatctctttacaagaaatccgcattgcaaaaagcccgtgggttaagaagaaagtgaaaacagccggaaaaaagaaaaaggccaataagaaaaaaaccacaaaaaaatccagcaagatttatcacaaggtgaaaaagggtgatacgtattggggctgcgcccgcaaatacggaactactgtcagcgcattgaggcggctcaatccatggcctgacagaagaatacctatcggggtaaagatgcggattaaatagggagggcacgggaaatggctacgagggactacattccttttgataaagaggatattccgcagcagttcgaatttgatttagcagatgacacgtttattctgcgtataaattacaatcaatccgatgatagtttttcactggatttatatgagcaggatatgacgcctatcgtgctgggcgagaagcttatacttaacgttcctctgtggactgacattgtaagtgaaaacctgccggcccccgcccttatccctttagatgaatcaaattcagaaacacgggttacatataagaatttcatggaaaccgtgtttctttttattgatgatgtagctgacggatcggagggggatgacattggcgacgacgaataaaaagttgtttggccgggttgtcaaaataaccattgataacggcagttcgcagaccacatttgattacaaggatttagaaattcattttgaagtgcccttcgacgatgattttaaacccaatgaaacaaaagttgagatttacaatcttagcaaagattcgatcaacaagattaaaaaaggcagcacgataacggtccaggccggttatcgagacgactacggcgttttgacgattggcaaagtgacaaaggttctgaataactggaacggtttggataaggtgacgtcgatctattcaaaagacggcgatgattatacccatatgaaagtgacaaccgccaatgctgatcctgctgagaaatattatgtcaaaaaaagatataagcttgcaaaaccggttgttactgtcaggaaagacaaaaacggccgaacatacaagactgtcaggaattacgggacgcgggaagaggttaggtatcgcaaacgatacatgaagattacttttaaagcaggaaccacatcgaggcaaattgtagataaactgctgcgcgttctcggaattaaagtgaaaaacattatcctgccgaaaaataaggtgtacaaaaagggttaccgggtgactggcttaatagaaaataatttagaagaagtcatacatgatgctggagccgttatgtactatcgacgagggaaaccggttattcgcccacttaatcagggcgatgatgagcgtttcaaattagaagaggccaccgggctaattgagacacctgagcaggttgaggaagatgatttcaaaggttacaagacgaagtgtcttcttcagcaccgtatcgctgttgcttcaattattgaaatcaacagcaaaacagcaaaaggaaaatatcgagtgaaagagggtactcattcgtttgatggaagagactttttcacagaatgcaaggtgatgtaatgagtaaagcgacgaggtttttcgatgcttttgagaaaagaatcaaactatccatccatacactggccccggctcgcgttgtgaaatacaatgcggaaaagcatactgctgatctgcaattgttgtttcttatgaatgatggtgaataccttcatgaatacccgttgatcgaacatgcaccagttttaaagcatgttgaacctgatataaaggttggttcctcggtctttgtttcattcgctgaaagatcccttgataacttggatggaaacaaaacgtttgatcctgattctcgacgaacgcacagtatcaatgatccggtggtcataggagtgtgggaaggatgaaaacgctcaagcttgtagacggtgatctatgttttgaaaacggcactcttcagatggtcgaggggaacgaggaaattgctcaatcagtcgaattaaccttaaaaacacggttaggggaatttactctggatgaacatttcggcttggatcggagtaacattctcgggaaaggctttgaccaagaagaggcccaatacgacatcattaatgctgtgacacaagacgagcgcattgcgagcgttgaatcggttgagttttctcatgataaagagacacgaaacctatctgtccacttgaaaatgaagaaagaggatgatcaaacaatcgagcttgggggtgttgatcttgcttaatgaaacaggattccaacggcaaacctattcggagcttcttgacggcatggaggacaaagcgaaggagctgtttggcgaagatataaacacgtcaagcaaaacgccattaggcattatcctacgtatctttgcttggtttttggcgggaatttgggacattgcagagcgggtttataatagcggctttgtcagtaaatcggagggcgttcagttggacaggttgggaagtaatttcggtataagccgggagccggcggctgaggcggtcacaactctgttttttaccggggaacccggattcgtcatagaagaacaaacccaatatacaacggaatccggtatttattttgaactaatcgaagatgttgtaatcggggatgatggaacgggcacaggggcggctgtatcgctgtctaaagggattattaacaatgtcgcggccaataccattactgaacaggctgagacgttagagggagtttattcagtgaataatccggaagcagctgccggcggcactgacgaggaatctgatccggaatttcgggcgcgaattaaaaaatcagttgaaggcagttcagcttctacgaatagcggcatcatttcgtcattgcttgccgtttcgggcgttcgttcagcgaatatagtcgcgaataataccatgcaaacggatgcggacggaaatccaccgaaaagcattcatgcttatgtcctcgggggaacaaaagtagacgtggcgcaagctctgtttgacagcgtggcggccggtattgaaacagtcggagaacaatcggttgtcattacagatgcaagcggtttggatcatgatgtgaaatttgattttgcaaaagaagtaaaaatttatgtgcagcttgatttaaaaacaaacgcttcattcccagccgacggcgtgagtcaaatcaaaaagaatctcgtatataaaattggcgggattgatgaaaatggttcatcttttaccggctcgcagatgggtgatgatgttattctgtcgcaactttttaacgctgtatatcaggtgaatggagtttcagatgtaactatacaaatcgggaaggatgcggcggctctcagtcagtcaaatattacaattgaaccgagagaagttgcgcaagttcacttctctgaaatagtggtgaatctgatatgatcaaagatttaataggaaagctgactgatgcgttcttgaaagacgaaaagagcaatatcgggaagctttttttaattgtcgatgaacaattgacagcattaaaaaattcactgacaacggcggaacaatggcgggatattgacgcggcgcgcgggaaatcgctggaccttctcggggataacgttgcccaggatcggggccgggccactgatgaaatataccgcgtgctcattcgtggaaaggtagcccggaatgcctcagacgggacaacgaaccggattattgaagcgctggcgaaaacattgaactgcaagccgagtgaaataaacattgtgagcagcaaagaaaacaaccaggatgaaccagctgcaatcattgtgaaaaaggcgccgatcgaggcattaagcaaggtaggaatgagcgaaacgcaattttcgaacatcgttcaaaaaacggtggctgcgggggttcgagttgcttatgtggatttaaacggcactttctgtttttcatcatcagccagcaccatagaaacaagccaatatgggttttcttctgatggaaaagacggcgggaccttggggggcatcttccggccagaagatgattacccgttaccaatttaaggagtgtgatgcatatgccttttacaaaagaattaccagaatgggggaaccccggtcagcggccgccgcaaacgtccattgatcaagggtataagccgatggaccacccgccggccgattggtttaactggtatcaatatacggcctatcaggctttgaaagagttgcaaacgatcggagcaacgaaagaagatgtttcttctgctgtatctgatgccgaagcttatactgacaagcacgaaaaacggactgacaacccgcacaagacaacaaaagcacaagtggggctgggtaacgttgacaatgtgcagcaggcttccaaagtcgattttgatacacataccaatgacaatgaccgccatattacggctacagagcgcgtaaactgggatgccaaggagacaacagcaggtgcatcaaataaagctgctacggccgaaaggaatgccaaggaatacgccgataaacatatcgacgataaaaacaaccctcatgaggttacaaaggaccagatcgggcttagtaacgttgaaaatgttagacaggccgactattatgcgtttcgccaacacgacaacaacggagaacgccacacatcaaaggcagaacgggagaaatggaacaatgggcaattatcgaaaataactgatgacgcgggaggcgctctggtatctattagtgatacagatgacttttacagcaaaattgttcaaagtgggaagcgattcggtactttttattcaacaggaaaagcggtaaatgcccccagcacaagctctacaaggggggtttttcatttaacctcattagacagcaacggattggggacatacggttatgtaatcgcggtagacttcaaaaataatgtattctccaattatgtagacggcagcctgacttggagcgggtggaaacgccttttgtcagatggtgatttatcaccgtcttggaatactgtatcacttattaacggggcgaagcaggattcaagtttcccgtttatgttttcggtagtaaataataccttgtggctggctggatcattcggttccctgccatctataggaacagttgtggcgaaattcgcatataaaccgacacgcctacttgattttgcggttccgacaattgggtcatacgggactgcccggtttgctttcacaacaaacggtgagttgaggtatgacggtatgatggcaaatgataactcagcggtaacccgggtatcattcgataaaccaatcccattatggtaaggaggggagaatatgcatgttctattttacgacgagaataaaaagtatataggtgaagctgatattgagggaaaagagctgccgccgaatagtacaaaagcgcaaataaaacctggcatgtacgacccggaatttgacgagattaaaggtgaatgggttgaagctgcgactcgggagtacattgatcaaacaaaaggtattcctgaacccaatcccttaatggagcagatttctgcaatcagtaaacaactatcagcagaagagcttgcaagaaagcaagctgaagaaggccagcaggctcttgggatgcagcttacagatgaaatcatagcacgaaagcaggctgaagcagtcaatatatcaatgggcaaacagcttgccgccttaaagcttaaattgttggaattggaaggaggggtgaccagtgaatcttaatttctgggtatatgccttgttctacaagtgggcgacaaccgcaatggtaaagcaggcaatgggttttaacgattgtaccatcgacgatatgaaagagggtgtggctgctgcgtatgttacaccggatcagtttcaggaagtaatagggcaaccatacgaggaacaaccagaagccaattaataaggcttttttattttgcctcaaaggaggtgaaacgtatgagatagataaaaggggggcgtactaatgtcacaattgacggaggtacaagaagtgaatgcttttcaaaaagaaatgtcagaggttaaagccgagcaaaaggctcttgaacagcgagtgagtgttcttgaacgttcttcagacaggcatgatcagcaaatcatttcattaaacgaaaagctgaataaaattgatgaaaatacgacttggatcaaacggaccatcacaggggccataataacggcagtcagtaccggttttatcggcggggctatcgcgatcatgtataacctgctgcaaaaataaggaggaaaataacatatgaaaaaattcgacaaaggtacagtcgtccggactgtgcttctttttattgctctggtaaaccaagttttagtgatgtttggtaaagatgtgctaccgattgcagatgatcaagtgaatgaccttgcggacgcggtttacttaggcggctccatcgggtttacgatcatcatgtcactggtagcatggttcaaaaacaactatgtgactgaaaaaggccataagcaaaaaaccgttttaaaacagcacgatttaaccaagtaagggctgccgttcggcggcctttttatatttcaaaacagaataggagagaattttatgtcagcatttagaaaccaatatattgatattaataaatggacgcggccgggaatcaaaaacaacggcgtgaagaaactggctttacattacacggcaaaccccggcgcgtctgctgctaatcattatagatattttggtcaaacgctccccgcacagaacagaaatctgcctgagaaaaaacagacgtttgcatctgcacagatctttgtcgatcgtacagaggctatttgcatcatcccattgaatgaggtggcctatcatgcgaatgacgttcagcaattcgtcaacgggcagccttaccggggtgtcgcggcgctgaagccgaatgcgaatttcttgtctgtaggcgtggagctttgcatcgaaaaggacgggacttttcatcctgataccattgcccgcgcagaacaagtttgtgccgagctgtgcaaaatgtataaactcgatccaatcaatgacattgtgcgccattacgacattacacataaaatctgtccggcgccgtgggtaagcaactctcaagggtttaccgattttaagacccgtgttaaaaagcgaatggccggcgtggttgtaacggtgcctgtggtatcaaatccagatgttactcatacagacacaggaagattcattaaaaacacggtggtttcaagtgatgggcttgttttacgtacacaacggagcgcctcttcttccatggtgcttaacctgccgaatggcacagttgtaaaatatcagcttggatcaactgtcaacggatggggatatgttgaatacaccaattcaaaaggcaagacattccacggatatgtgaatgtctcctatatcaaaagcgataacgagctgaaaagcggcaacaagaagaaagcaacatcgtcaaagcctaaatccactcaaaaatcaaaatttagcctgcctgcgggtacttttaaagtcacaagcccattgacccgaggggaggccgtaaaacggattcagacagcgctggcggctcttcattattacccggataagagtgcaaagaatttcggaatagacggcgcatatggcgtgaaaacagcaaacgcggtcaaacgattccaatctatgtacgggttaactgctgacggcatctatgggccgaaaacgaaaacaaagcttgaatcccttctcaaataaaaaaagcccttccgattgggagggcctttttttaatcttcttcttttacacagtcttcgcaaaaaccagaaccgtataaaaactctacacgcttaccgcatttaccacattgacaactttcagccaaaagaaacactcctttcactcaatataagagaattataacaatatagaacaaaaataccaattttatttacaatacctatttacaatggtaaacagatattgtataattgaagtatagaaaggaggtgctgaggtggacgagatcagaaacatcgttcttatcatcgctggtatcgtgaccattatcaaaaacatctatgatatatggcagaaagaaagcgaaaagcgagaaaagaacatgaaaaagcgctcccgccgggtaagcaagaagcgctaaaaacatagtgagacaaggggagaaaatccccttgctccattattatatcacgtccacgacgatatgaaaaaatattttaagcagtacagctcgtttgatatgaccactcttattatcatcattgctggtatagtggctattgattacgaatcagccggtacccttgggaaaatcacaacgtttgttttatacttggccgtaatggttattttattaaaaggattttttatgatgtggagagaaagccgacatgaaagaaagtgaaaaaattaggtttatccaagatgaagttttgacggctgctgaagttgccgagctgctttctgttagccggcagcgcgtaagccagcttgtcagcggcggccggatcaaggcggtaaagaaagtgggaacggtggctttgttcttgctggaacatgtacaagctttaaaaaaagaattagagacggagcggaaaaaataccggccgtatgatgaataaaagcccttcttgagttagaagggcttttgtttatatggttttaattttattcttattcttcgtagagcttatctactaactccgtaaatgagttacatatatgactcaaagcaccttcagggttttcaaatgcaatttcatgatcccaaaaaaccactgagggattttctttattctgacgataatcaaaacagatttcgttaccaaaaggatcacaggcaaaaggaattattcctgaaagcattcttccgtcctggtaatcttctaagacttctaaaataaaacttgaactatcttcagttaaaccatgtaatcgattaaaaaccgcgccttttgtatttttaaagtcaaatatctttttacttggacgtgccccattgttatttaatatagttgaaatgtagtcgtttggaaacttaatatctaatgccttttcgattttttttacagttgtttccccgatgggctcttccgcaaatctccactctgtcatattgaccaactcctatctgttcttacttcctccaccccaaagatgccggcctcctgtatggcctgttttccgatgcaccttttggtcaactaattgcattctccctggatcttggtgatgatgccaagtatatccgtctggtgtttcaccagcttttatcatttcgatttgaaggtcattgaattgatttctaagtaaagggtctttttcaatttctttttttaattttaaggttgcatctttaaattgtaaataatcgctttccttataaagattagaatcaatcttcgtatcaaatcttgctttaaaaattgggaaaccgtctttattatatggaacgccagttttaggatgtttttcgtttttaagatggcccattttcaagttaactgttttgaggtttccgtattcatctctataagtatatggtgcggctttagtaaacaaatcatcctttgattgtactaatctctttaaaagcggggtgttttttacattatgggtgttttcaatatcttgtactattccaacaagggcaggttcgttcttatttttcaataaagagttgatgtagtctgttccgttttttattcctgtgtgtacatggcttgcagcgccaggctccaatacttttcccgccttggagaagcctgtttttgcaagtttacttgatacgttaaccgtcgagcccacacctttcaggccgacaagactgcccaccgcataggagatgtagtgcgctctagagtacgtatcaccattcaccatttgatcattccacgaatcggctaggtttgtccatatgatttttgcgtaagacggagtattcaatacggtagaaatcgttttaacaaccttttgttcatctgagagctgataaaagtcccaggcgccgacagcgaggtctttcagacctaacacagtgtctttcccaacatcataaaggccgactgcaacccctttgaaaccatctgtgagctcttgcgtgttttcaatttgagtaaagtatcgctgctgttcttttgtcaggttttcatagccgatcgttttggccattgagtagaactcatcagcatttgcatagtcgaaattgttcagtcgttctttcagtttttcgacctcacgttcccttgcttcttctttcttaatcgtaagataagcatccgagtgccttgtaatctcgcctttcttcttatggatgtcgctttcacggtacaccttggcattgtagtgaagcggagcggcgtttttccctttgcccgtggcgttttgaagttgttggaagtcagcttgaatgaactgttcgttcgcttcggtttctgcgtattctttcgttaaatcgtgatcaagcttgccgagcttatgtatcgtttcgcttctttttttgtcagctgaggaaagcttctgatctgtgctttcggttgaaaacaattcgagcgagatgatgtcttcgatctctccgaggatggagcgcatgtcttttttctgctcttccataatcgcctttgatttactgagggcgtgggtgagctcatgctccagaaatgattcctccacatgcgaattggaaagtccggcatcttcgaccttaccgggaaggcttgtgagaaatgcgattttgatatcgatcagatcaagccagctgtctgtgacgccggcatggtcttggaaaaaggctttgatgttgtcagcgccccggcctgaaaagtcgctgtcaccgaggtcagccataccttgaaacgctttttttagattgaccatctggccgcgcagttctttgtattcactcgcacgctgtttggcagcggtcagcagggtatttgcttcgaaaactttcatgaccatatcctttcatacgaaatactttaacaagatattaccatggaagaatgaagaaaaagatcgctgtacgattcaaaaggggaaaatgaatagtttgacctgagtctttttgcttattcttgagtagttaaacatttaagtaatgagggttgtcacccggcagcgtttaaggcccccttgtcacttttggaatgctcaagccggttaaataggttgggacagtcgcattgtttttgcttggacatgtacaagctttaaaaaaagaattagaggaagagcggaaaaagtatcgtccgtatgatgaatgaagcccttttcaaaatgagaagggtttttctgcaatttatttaaattcacttacaacagtaaatgcgtaaacggagttcaattgatgtaaggtttgacgtctgagggtatttaagggcaggagactagacataaaatcctgcatttattgagataagtagtcgtttatacctttcggtgatcaagtgagtaaaactaaatgatcagggggggaaaagctttcctagttaattttaaccaaaatatggtactggggtttttttgaaaaccagagtttgatatggttttttaaaaggaggaatgtattttgaaatttaagatttttagttcagtaatgtcaatcgcaattgcatctagtttaactttgccgtcatttgcttcggctgaaactttctctgcccctaaagtttctaaggaatgttcacaaccattatcagagggggaggtgaccgataaatacgggaaacctattgaattaaaagatacggatactgatatgaaaattgcattagagattgcaaaatctgatttagaagaaaaggcagtagttaataaagagggttttgctgaaaacttttacaaaaatgcaaaagatgcaaatgttagtgaaaaagctttcgaggaatttaatgcatcattggaaaatttaaataagggtgtaaaaaacggtcaatataaattaggtagtaatatatctgatataaacgtatcagccgcagaagatagtgatgtttctgctcaagcaacatggttcatctcacattctaaatctgcaaaagcccaaaaattaattttggcgggtgcaggtatttctttgcttgcttctgaattaggtgttccggttctcgtggcttctggtttagctgcactagcatccggagctggcctatgtgattggaatgacaaaggtttttatttggtctatgctgctaacattttttattgtgtgccaaagttttaaaaaattaaaagagttcagggtgggctaaatgcataaaattattaattacatcttggtaagcttgttattggtgtatatcattgtttctttttctttggattttagtaacaatgatattccatatatttttgttgctctgattctcatcattgtttcctttatctttgagaagagaaagtcatataaaaattgaatttttcaagcagaaaggcctttcctaaacggaagggccttttttgagttgcttatccataacgtcattttaacaatgaacccaaaaaatagtaatattttcccttgtctctaattgcgtaaaaacgaaataagaattgcggtatatcgaaaattatttctatatattacatattatgctaaacgtatgctagaatattgtttgagaaaatttagaatatttgtagaaagaggggtttatcatatgagtaaactggcttctgaaagagttgcaaatatattaaatgattggtatatcgcgataaaacaacaagacgtagagtctgctaagagatattttgaagagatcaaaccattgtttgatgaaatggaagaggatcaggaagttttgatgtattattctttgctggaagagcgacataaaatgttactttaccaaacgaaaggagagcaattgccgaaacactcctattttgcgaataagcatgcaaaggaaattgaaaaaacggatgccatgatagaatattacttttatttatttgaagcgctttacgagtcatacaatagaaatttcgagagcgccatcagtctatttaatgacgcggaaaaaaagctttcattaataccagatgaaattgaagctgcagaattttattcaaaagttgcctctatgtacatgatgttgggccaaaacatcgtatcgttaaattatataactaatgcaatgaatatctataagaataacgaaaattatttgaagcaatttgcgacctcgttaatggtggttgctcataattacactgaattgggacaatacgaaaaatcagaggaacattatttgcaagcaattaaagtggcaaaaaaattggacgattcttttttcgcagcaatgattcatcacaatttaagcattacatactcagaggcgaagcgatcgcaggattgtcttaatgccatcaagcatgcattaagaaataaagactggtgcggatcatcgtattatattcattcgttatacatgattgcaaaagagctggtggtgatgggggaaaacaataaagcctcatattatttgaaaaagggacaggaaaatcttagacaaaaacagaataaaatatacgaagctaaaataaatattattcatgagctttcacaaagtcctttaaatgagcgtgttgatcggattcacagtcatatgaacagattagcagaacaaaatgactttgacagcattcgcgatctagctctaatcacttcaaaaaaatttgaagaaaggggactttataaagaggctctaaagttttctaataaagctattttagctgaaaagaaaatgaagcagttggagggaatttgatgaaaaagagaattctttttgcggcattatctgttgcttgtttgagcgggttagctgttgcgggctttatagggttttctaataaacatgtagctgaaaagccagtcggtacttatatattagctgaaaagccagtcggcacataataaaaaacaagtctcaattaaaagatgggggtcataatatgacaaaaggcgttaaaataacattatggagcatcttagggatagtcatcgtgttaatgataattggagttgtctctttttatcagaccccatcttcataaagtgaaagcagaaaaaagcccttagatagggctttttttaatagtcatgtttaatatgtactactcctgaattacttatttggataagtgtatttgctggcttagttttcattatttttatgatgaagtttcttatttcagattgtttaacagctctttcacgattagaaatgcttccatactgtccttctttataacagtcatgaaaacctactgtgtccgtaccaacaaccgagtaaattttaacattttcccctgcgctgggacttgtcattttcattacgtttactatttcaggtttatcttcagttatatccttaaatttcatggcgctcctccttgagtctgctttttttatatttgatctaagaatgttaaaagctctggatcattgattttaaacaccataaattgaatgtaatctatctcatttgtgtcagggaaacagaaatttgttatctcaaagtgtgttccggattttcctaatatgccagcaatacgcaacgcaatttcaacattttcaaagtctatgttgaaagctacaaatttttggttcgaataataatctcttatttttgaatcgctagggttacacggattagacatagaatttaggaaaatcttcaatttttcagttgggaaattagtcattttttcagttaacctccgaatattttggtatatcataaccgaaatgaaaaaatattgaaagggatggaaaaactcttatgtggtttgctggtcgttgattttctgcagtctttaatcatcaactgtagcaatcgtttcaaaacgtccacttatttttatgcttatcccatttcagcatacgctgcctcataaggttcttcactgcttcccggataacgcgttcatccttaccggtttttctcttcaattcatccaaggagggatttttcccgaaacgggtcatgtttatgatgatcctgtatactttcctctcaaaatcattcattcgaattacctcctgcatagaataataccagaacaaacattcccttttcaacttgaaatagaacaaaagttcgtataagatgatagtaaataaggaggggcagcagcatgaaagcattgttaaatcgttcgttaaatgaaaaatcagcactggacatgatttatataaaagcagatggaacagtctcgaaaagaaccatcatagtgcaccaggtaaaacaaaattttatccgggcattttgttttaagagtaggcagacaaaaacatttaggatcgacaatattcttgctcttgccccgaccaattataaaaaaggggtaaggaatcatgcgtgatatgacaaaaaggcaatctgaaacactgcaagcgattattcatttcattaatgaacacggtgtggctccgacttatagggagttaatgaaacacctcggtttaagctctacgagcacagtaaaggggcatctcgacaaattaaaggagaagaattacataacgtggcagaatggttgcccgcgtacgctgaaattggaaaaaagagctcagcaattctgaagctctttttctattgactgcactttttccgcaccagcctacaattggacaagaactgacgttcgtgaaagttgtaggctgcccgcaaccattatgatataattttgaaaaatgtaccttttgcaaacggggtgatattttgttttttgaggaaaaaaatacagaggaattgatcagatatgaagattatccctacgcggtttatgccagggtttcgtctgaaaaggatagccaaacaacatccatacaaaaccagatagacatatgccatcattggattgaaaaaaacaactatgaatggaaagacgaggccatccagctggacgacggtataagtggaaccattcttctcgaccgtaaagccatgcagctaattttaaacaaagccaagaatcacaaattgaaaatggttgtatttaaatccatcagccggcttgcaagggatctgaaggatgcgctggatataaaagaagttttgttggcacatggcgttcgtgtagttacgctggaagagggatatgacagtttatatgaaggaaaaaactcaatgaagttcgaaatgttttcaatgtttgctgctcaatacccacagacaatatcggtttcagcaagtagcgcgctcgcagcgaaagcaaggcgcggggagcattcaggccgggttccgtatggatataagaaaaacggcaagtttcttgaaatttacgaagaacaagcaaaagtgattcgcatgatttttgatttatacaataatcacggttatggccagaagagagttgtgcacaaattaaatgaagaattgctgctcggcaatattcccaagcctcagcagaatgagcggtggcaactatcaactgttcagaggattttacaaaatccgatctattgcggtgtgttcattgcaaaccggtatactcaagtgaaaatcgggggccgaaaaaagttcatccgtaacccagaggaaaaatggacgatttataaagactgggcgccgaagatcattacactggaagattacgaaaaggcgaataataaaaagcatgtgctgaaaaaacggcgtttcaatccgaagaacgaacttcgcggcttaatgaagtgcggtgtttgcggcgcgaacatggtcatcctgttcagttatagacgcaggaaaaaagacggcgtgaaagtggagcacaattatgtgaagtgcagcgcctaccgacgcggagggaaaaacatgtgtatttctcacccgcccatccagtataaagatttacgcgaaatagttattgaaaagctcaaggagaagggccgtaaattaaaactgaatgtgaaatcagattatgaagagaaaaagaaaaggcggatcagagaaacaaaagttcaaattgaagcagctgagaaaaaacataaacggctgctggaattattcctcgaagaccaaatgatctcaaaagcggaattccaatccaagcggaaagagatcgaggaacaattggaacagttaaacgataagctgtttctgcttgagcgtgaagaagaggaatcaattgacattaccaacattaaaatcgcttttagtcttctaaagaaaaaggaccaggatttgtatgaggcgtttcatgcgcttatcgaaaaattggtcattcatgaagatggaaccgttgattttcattataaattccagtgatcattctcatttatgtttgcaaaagatatgcataacaaatgccatgcagaagttaggtgtgaaagggcgttcgcaagctgttgtcgagcttcttagaatgggtgagctagagctctgattcttgccggttttccttcttttcgagaaggagccggttatttgcgttggcgcccgggctgatgggcatgcggtgaaaatcccggtttttcctttttctccgtcagtcttgcattttcttaaaaaaagaaggaaaatagacacggagcgcatagcccagaaagatccttgagtgagggatggacaaatgacatcaaaatctgtagagcatgttgcggatatcgaaaaatcactccgccatatcgctgcgatcattaaacaaaaaggaagagaaatccttaaccaatatgcaattacaccgccgcaattcgtggggcttcaatggctttatgaattgggggatatgacaataggcgaattatcaggcaaaatgtatttggcttgcagcacgacgacggatctgatagaccgcatggaaaaaaataagcttgtcgagcgggtcaaagacccggctgacagacgggtcgtcagaattcatcttctcgctgaaggagagcgcattatccaagaagtgattttgaaaagacaggcttatttgcgggatatgtttgcgacattttccgaagaagaaacagccgctttcgaaaaatcattattgaaactgcagcatgaaatgaaaagaaaatgaggcgattttgttggaacagccgataggagtcattgattccggggttggcgggttaaccgttgctaaggaaatcatgagacagctaccgaaggaaaatatcatctatgtgggagatacaaaacgctgcccgtacggcccgcgtcctgaagaagaagttcttcaatacacgtgggaaatgaccgattacctgctggaaaaccaccatatcaaaatgctcgtgatcgcctgcaatacggccacggccattgccttggaggatattcagcgcaaaacggatattccggttgtcggcgtcattcagccgggtgcaagaacggcgataaaggtcacgaaaaaccagcatatcggcgtcatcggcacggtcaataccattaaaagcagagcgtatgagcaggcgctgctcggattaaacgcagaacttcaagttgagaacacggcttgtccgctgctcgtaccgtttgtggaaagcggacggtttcttcaggaatcagcggaggaagcggttgaagcatcgcttgagcctttaaaaggtacatcaattgacaccttgattttaggatgtacacattatccgattttaaaggatccgattcagaactatatgggagagcatgtgaaaatcatttcctccggagacgagacggcgagagaagtgagcaccatcttgtcttataaaggtttgttaaaccaatcgaaacatgcaccggagcatcaatttcttacaacgggagagcggaacggcttcgcaaaaattgccgaagactggttcggccacgaaatcggccatgtcgagtgcatctcccttcaagagccggtcagaaaataaatcaaaaaacccgctgtttacggcgggtttttttgcgcttcccggtctatttcccggacagggctcgtatacatcatagtacaaacagccttaggagggaaaagtatgctgaaaaaaggacctgcagtcattgctgcaacatgtcttacttcggcttttgtgttatctggatgcggtttgtttcaatccgataaaacagccggggaaattgacccgcctcaagacatttcatatgtaaaggatgaagcgggaattcaggcaaaaccaaagcagtcagagaaaaacggcacttctaaagccgaccagccggccaatacagtcatgcgagagctgtatctgattgataaaaacggctatgtcgcagcacagacactgcctcttccgaacagtgagggaaccgcaaagcaggcccttgagtatttggttcagggagggcctgtgtcagaaatcctgccgaacggcttcagagcggtgctccctgcggatacgacggtaaatgtcgatattaaaaaagacggcactgccgtcgctgatttttcgaaggaatttaaaaactataaaaaagaagacgaacaaaaaatcctgcaatcgattacatggacgcttacccaattcagctcaatagataaagtcaaaatcagaatcaacgggcacgagctgaaagaaatgcctgtgggcggcacgccaactacgggcgacttaagcagaaaagacgggattaatattgaaacggccggagtgaatgatctgacagacacccatccgctgactgtctattatctggcggaaacagagacgagcgaatactacgtgcctgtcacaaagcggattgacaattcggaaacaaatgacatcaccgctgccgttgaacagctcgccgacggaccgggcaaagcaagcgggcttttgacggactttaataacgatgttaagcttctcagcaagccgaaagtaaaagacggccaagttacactggactttaacagctccatttacggaagcgccgacgaaaaaacaaaaatggtatcatcgggcgtactggacagcatcgttctcacattaaccgaacagccgtcgattaaaagtgtttctataaaagtaaacggaaaatcagaactggtgaatgaaaaaggagaatccctttcaaaacctgtttcgaggccgtcacaagtgaatacgggtagtttttaatttgcgatttttgatatactagtaaaaaagaggttagcgttccggctgcctctttctttattcacaatccggaacaaaaggtttatgtacatataatcggaggtaaaatatgagacacgacggaagacagcacgatgagctgcgccctatcacatttgatttggattttatcactcacccggaaggctctgttttaattacagcgggaaatacgaaggtcatctgtaatgcatctgtggaagaccgggtgccgccatttttacgcggcggaggaaaaggctggatcacagcggaatacagcatgcttccccgcgcgacgaatcaaagaacgataagagaatcttcaaaaggaaaggtctccggcagaacgatggaaattcagcggctgatcgggcgcgcgctccgggccgtcgttgatttggagaagctcggcgaacggacgatctggatcgactgtgacgtcattcaagctgacggcggaacaagaacggcttccattaccggcgccttcttggcaatggccattgcgatcggcaaactcgtaaaaagcggcgttatcaaaacctctcctgtgacagattatctcgcggccatttctgtcgggatggataaagaagaaggccttcttttggatctgaattatgaagaggattcgacggctgaagtcgacatgaatatcatcatgacgggaagcggacgttttgtagagcttcaagggacgggcgaagaagccacattctcccgtgaagatttaaacggactgttaagccttgccgaaaaaggaatccagacgcttattcaaaagcaaaaagaagtgctgggagaaacattgcctgaactgaaataagaaagagaggcctgatcaccgtgaaagaagccattattgcgacacacaatcagggaaaagtgaaagaattcaaggaaatactcgaaccgaaaggctacagcgtctcttctttggcggaaatcggatttacggaagaaattgaagaaaccggacatacttttgaagaaaacgccatcttaaaagcggaagccgtggcaaaagccgtcaacaaaatggtcattgcagacgactccggtttatcggtggacaaccttggaggcagaccgggcgtttattcagcccgttatgccggagaagcaaaagatgataaagcgaatatggacaaggtgctgtcagaattaaaaggcatcgaaaaagagcagcgcacggcccgtttccgctgcgcccttgccgtcagcatgccggggcaggaaacaaaaacggtcgaaggtcatgttgaagggtatattgcggaaggacccgagggggataacgggttcggctatgatcccatttttattgtaaaagataaagataaaaccatggcccagctgacaagcgctgagaaaaacaaaatcagccacagggctgaggcgctcaagaaactgtcaaagctgcttgattcataagggggagcgtatgcaatgaaagtgctgataataagtgacagtcacggccttgaagacgagctggagacgattgcaaagcggcacgaagacgaagcggatctgatgattcattgcggtgattcagagcttgacgccgcacatccggcactcacgccgtttcacacggtaaaaggcaattgcgactttggcggcgggtttcaggatgaacttcttctggacgccggttcaaagaaaattctggccgttcacgggcatcttcacggcattaaacagtcacttttaactgttttttaccgggcggaagagcttggggcggatgtcgtctgcttcggccattcacatattgccgggagtgaagagcttcggggcaagcttttgattaatccgggcagcatccgtcttccaagagtccgcaatgtgaaaagctatgccattcttactcttactgaaagagaagtcgccgtgacattttacgacgaaacgggtcgggaattgaaggacttggggactacaatcagtttttaacaagtgatgggggagatttcattcttccccatcaaaagtttttaaaaaaatattgacttatgatttgaacctgtatataataaatcttgtcgctgatacataaagcaaaagctgtcccagtagctcagctggatagagcaacggccttctaagccgtcggtcgggagttcgaatctctcctgggacgtacaaaaaaaagagctggtgacatcagagtgaaaactgatgccgctggccttttttatcggatgcctatattgtcaattcggtgaaatcatggtaaaatgatcagcagaacaatttgtttttcatgtcccagtagctcagccggatagagcaacggccttctaagccgtcggtcgggagttcgaatctctcctgggacgctaagaaatcgggtgtgaagcccgtcaaatcaacctcttatttcgtttagtgaaacggtcagtataacggtcaagtaagaaattacacctgttattggcttatatcactttcggtataggaggttttttgttgtgaccaaaagaaaatgaaaatgaagctgactatgtgctaaaacgcaaggtaaatatcatgaaaaaggctgaaaaacgtcacaagcaaaggcttcaggaatacaaggaacagaagattggatttgccactgaggagaggaagtatttattagactcttctacacgcagcaagtacttgaagatatctttgctggctatgacttgggagttaagaggttacacttgcagaatctatatatggagcggatgcggcaattattcgatttatataacctaaaaggcacaaactttgtaagagtctcttaattgaggctcttctttttatcgatcaaatctgatgtcgcagctccgatatttaaacaataactaataaaacccgtcttttattcacttggttaaagaatgaacctaaactaaggagcagagtagaaaaaagagcgatacatattattcctaatttttgcatgattatagtataatagacacaaacaaccttttaggaaaacggtgataacaatgagtggcaacttttcattttttcaagggaaatgggatgtacttgctaacttgggagagacagctgagagaaatgtatatcatgacccccatacaacagtaatgaaactgcgattgttcgctgaaacactaactaaatttattcttgccgctgaaaatattaaagaggcatatggtacaacgcaagtggatcgcattaacactttgcgtcgggaaaggttacttgagcctgaattaattgatatattagaggctcttcgtcgcaaagggaatgtagcgatgcatgaagcggattatggaaaagtagaagaagcaaaggctttgttgcaattaacgttccgcttgtccatttggttcatggaggtatatggtgattgggattttcaagcaccagagtatacagaacttcaagaacaagtagaacagagtacagaaacacttcagcgagaatatgaggaaaaagtcaaaaagcttgaagaagaattagaggcaattcgtcgacaggcggaagtggaacaagaagaggtaaaaatcgagcgtaaaaaaatatccaaaaactttatgcgtcgacagcaattaactgaagccgaaacgcgtacgattattgatggaaaactacgtgctgttggatgggaagtagacacaactgtactcaatcatcaaaagaacggaacgctgccagagaaaaatcgaaacatggcaattgctgaatggaaggtcaatggcggcaggattgactatgcgttgtttattggcttaaagcttgttggctttattgaagctaaggcaaaaaagaaaacgattcctggcgcattagaaagtcaaacaaaagtgtatgcaaaaaatgcggcacaagtcgaagatgaagtcatcacacctacaacaggtgaatataaggtgccgttcttatacgcaacgaacggccgaccatacttgaaacaacttcaagaagagtcgggcatctggttttgggattcacgtaaaccgttagaacatgctcgcccattagaaggctggcattcacctgacgacttgcagcttcttcttagtcaagatgataaggatgcgaataaacgattagaagaagaggatattacgaagtttggtttgcgtcattatcagcaaagagcggtactttccgctgaagagggattaaaagaagggcaacgaagaatgcttattgcgatggcaactggaactgggaaaactcgtacagctatcgccctcatgtatcgcttaattaagtccaaaaaatgtcgtcgtattcttttccttgtagaccgtaattcgttaggaaaacagacagaggatgcacttaaggatacaaaaattgaaggctactcatttgctgatatatacgatgtgaagtctttagaagacatgtctccagaagttgaaacgaaggtgcaaattgcgacggtgcagggaatggttagaagacttttctatagcgataacgaaaagcttccaagtgtcgggcagtatgatttcatcattgtagatgaagcacatcgtggctatacaagtgacaaagaaatgtcagaggaagaattgaaattccgtgaccaaaatgattatattagccaatatcgacgtgtaattgattattttgatgcggcatgtttaggacttactgcaacaccagctcttcatacaacagagatttttggtatgcctatttttaagtattcttatagtgaagcggttctggatggctacttagttgaccatgaaccaccatatctgtttaagacagaactttcacaagtcggcattactcttgaaaaagacgaagaagttgaagtgtatgatgttgataaaggcgagattcaactagaaaaaatggaagataccattcattttgaggttgagcagtttaataaacgggtaattactgaaccttttaatcgggcggttctaaacaaactggttgaatacattgatccgacaggaaaagagaaaactcttatctttgcagccactgaccaacacgcagatttggttgttcggttattaaaggaagcctttaaagaacgtggcgatgaaattgaagatgatgctattatgaaaattactggctatatctataagccattagatgccattaaaaggtttaagaacgagcggctgccaaatgtcgttgtaacggttgatttactcaccacaggcattgacgttcctccaataacaaatctagtattcttacggcgtatacagtctcgtattctttatgaccaaatgcttggacgtgcaacccgtctttgtcccgacattggaaaaacacactttaacatttacgatgcagtgggcatctacgataaattgcaaagctatacggagatgaaacctgttgtaaagaaacaaaattacagtatcggtgaactatatgaatcacttgccaatgctactgcagaagatgaagcttcgttttatcgtaaccaattggcagcgaaaattcagcgtcgcaagcaaaggctgaatgaagaaggaaaacaaaagtttgaagaattgtcgaatggaaaaaatgtggatgagtgggcgaaagaaattcagttatatactccgcaagaagcaaaacagcacaacatgttatttgaatatatggaagcctatcgggtaaaaggcgagaaacgatatatctccaacaaagaggatgaagtaacagatgtggttcggggatatggtgaaggaaacaagagaccagaagattatttagaaggtttcgttcgttttatccaagaaaatattaatgaaattcccgctcttcatcttatttgcacacgaccgaaagatttaacaaggcaggatttacgagaacttattaccattctagaaacgaaaggctttaagcaatcgcatttgcagacagcttggaagcagacaaaaaatgaagacattgcagcagacattattagctttattcgccaagctgcattaggtgaagcactagttgcccatgaagcacgtattaaacaagcgatgcaaaaagtgtattcactgcatgattggactccaagacagaagaaatggttagagagaatagaaaagcaattacttaaagtgcctgtattagcaccgactgcagaagaggcattctcggaagaaccatttaaaactccgggcggctataaattgctgaagcgggagttcggtgactatattgatacggttgttaccactataaatgagaacctttatattagttaacaatgtgcctcttcataggggcactttttcagttataatagataagttactttatctttgattttcactttaatgaggtttgaatgagaatccaacattaaaatatactcagagttagcaggaggctgaaaaatgaacaaccaagaaatcgttcaaaaactatggaatttatgtaatgtgttacgtgatgatgggattacctatcagcaatatgtaacagagttaacctacttattattcctcaaaatgatgaaggagcaggaaacagaaggtgtgattccagaaggatatcgatgggatgatttgttagataaagaaggtttggaattaaagacattttatcagcgattattacttgaattaggaagcagtgaaaatgagcggctgcgtctaatatacagtgatgcttctacaagtattgctgagccgaaaaacttagagaagattattaaatcgattgatgcccttgattggtacaatgcaaaagaagaaggactgggcaatctttatgaaggattgttagagaagaatgccagtgaaaagaaatcgggagcggggcaatacttcacacctcgtgtattaattgatgtgatggttcaattaattgacccgaaaattggtgagcggtgtgctgaccctgcagctggaacattcggtttcatgattgctgcagaccaatatttaaagaatcaaacagatgattactttgatatagaaccacaagaagccgagttccaaaagaaagaagcctttgtagggatggaacttgttaaagatacgcatcgtctggcactcatgaatgcgttgcttcataatatcgaaggtcgtttggaacaaggagacacgttatcgggcaacgggaaatggatgaagaactttgatgttattttaacaaatccgccgttcggtacaaaaaaaggcggggaacgggtatcccgtgacgatttaacgtttgaaacatcgaataaacagttgaatttcttacagttgatttataacgctttaaaagatgatggaaatgcaagagcagcggttgtcttgcccgacaacgtgttgttcgaaagtggtattggcgcacaaattcgtcgtgacttgatgaacaagtgtaatctacacacgattttacgcttaccaacaggaattttttatgcgcaaggtgtaaaaacgaatgtcttattctttacaaggggaacaacagaccaagataacacgaaagatgtttgggtctatgaccttcgtacaaatatgacttcatttggaaaacgtaatcagctaacaatggctcattttgaaaacttcatgaaggcatatgtggcagaagaccgttctaaagtggaagatgaacgctggaatgtgtttacacgagaagaaattgccaaaaaggatgatagtttagatattggattgattgcggatgaatcattatcttcatatgaaaacttaccagacccgattgaatcagcagaagaagcgatagtgaaacttcagcaagcaatggatttattaggtgaagtagttgaggagttacgtgctgttgaagaggatggggtggtcagaaaatgagtaagacacaaaagaccatcgaagagttgatggaagaagtggtagtgccacatgaggaacaaccttatcaagtgccagagaattggatgtgggttaattcaggacacatattgaacttcataggtgggggcacaccttcgaagagtaatagtgattattggaatggagatattccgtgggctacagtaaaagatattaagaatgggtatttatcatctacaatagattatattacggttgaaggtttggaaaacagttcggctactatggcatcaccaaatgaactcttattaattacaagaatgtctcctggtaagagtgcaataacaaagatatcgacaaccattaatcaagatttaaaaatagtcagaccaaaaattgaaatactgccttattttttgtggttattttttacaatgaataccccgttaattgaatcgatgtcaacaggctctactgttaaaggtatacaagtagagaaacttaaaaaaatcactttcccactgccaccatttaatgaacaaaaacggattgctgagaaagtggagcggcttttaagtaaagttgaagaagcaaagcagttgattgaggaagcgaaggaaacgtttgaccttcgtcgagcggctattttggataaggcgtttcgtggggaattgacaaagaaatggcgtcaacaaaatctttcagtagattcggcagcccaaagacttgagatgataaaaaaagaaagatttcaaattgctgaaactaagagagaagtatctgaaataatagagatgtttgacgaacttaatatagtggaatgtataaataataatgattggttgtatataaaggcaaatatgttttgttataacataaattgtggaggtacaccttctaaagatatttctgaggaaggagaaattccatttttaaaagtttataacatagtaaataataaagttgacttttcgtataagcctcaatacattcctaaagaggttcataaatcaaagttaaagaaatcaatgttgagacctaatgatgtaattatgaatatagttggtccgccattaaaaaaaatagccataattccagaagaatattctgaaatgaacatgaatcaagcgattgtccgttttagaccaataaaatatgtattaccaaaatatctttattactgtctacaatatgatgaaacgttaagagatgtaatcaatgaaactagaggtgttgtaggtcaaagtaatatatctgtttctcaaagtagaaatttagttatgccaattccttcaattgaagaacaagctgaaatagtaagtaaattagaggaaatgattaagagagaagaaattgtgttaagcctagtgtctgatgaaaaaaatttagacgaactaaagcaatcaattctttcaaaagcattccgaggtgaattaggaacaaatgacccaagtgaagaaagtgcgattgaattgttaaaagaagtgctgcaagaacaggtgaaatagttataagaaggcatccaaattaattggatgcctgtcttttatggttgcgttgtggtattggtttgatacagaaccactctcattcacaaactgacaatcggtaaatttccgacacgactcacattatgaatgtgatttagcatggtaaagtaataagagttgcagtgaaaccctattcgagttcgataataatatcgatagcagagggtgtagacttataagtgatatcaaagaaaagataccgatgcctcaaggtggaatcaattatggacaacaaagaatttggatacgttagagtaagcagcaaagaacaaaatgaagcacgacaactggatagtatgtatgctcttggaagtgatgagcgtgatatttatatcgataagcaaagcgggaaagacgtcaatagacctcaataccaagctttgaaattgcgtttgcgtaaaggagatacgtatacatacattcattagataggctaggtcgtaacaaagagatgattttaaacgagtggaaagatatcacacagaacatcgaagcacatattgttgtaattgataagccattgttggatacacggaaatacaatgaatccatcggttctttcgtggctgacttggtgttacaggtattctcgtgggttgcatcagcatcgcaatagggacagcattctttgttatctctcatgaaaccacttctttaaataaatacctataccttttaacatagcagatttaagtacaactgtattacctcttcaataggttttttttctactatatgaatgcttgaactgtacagtataagcaaatataatagaaattaagtcaatcggtcaaagttcggaaagtgaccgttatacatgaacgtaacgatagcgatatgtaaaggatgaaggccggatagagcaacggccttctaagccgtcggtcgggagttcgaatctctcctgggacgtataaaaaacctcaagtcctgacaatgggtttgaggtttttttgtattttatttttttattttacgaaacaaaagttccgtatttgatgaaaaattgtaaagtaattttaatataaatgaaacttaatgtaatatttaccgtaataaatatatgtataaagatacttaaggcgcccttgagtgataaattatctaatttctatcatgcattttgtcaatgaatgatagaaagacagcaggaggaattagcttttgaagtacgcatttgcatataaaaatcacaatatagaaacgatcttttgcggaaaagacgagctgtttgaggaactgaagcaatttttaatcactcaatgcggtttaatcatcgttgaggtttcaagggctgattactatacggagcaggaaatgaatcagtggaatgaccgttatactctgtgaataagaaaagaaaccggccgtgggaggccggtttttgtatcatctgaatccgctcggagcgctgaagcccccggcatggccgctgaaaccgcccccgagcgcgccgggatgggcccctgcgccgaggcttccgccgacgtcactgaaggattggccgtagtacccggttgtataagggtacggaacgaattgctgcccggcgaatgacagcgtgctttgcggggtctgctgtccgtatccggatgacgggaatccctgctgaaaagaagggccgccttgatatggtgctgtatgcatcggggccggaggatagtaagactgcggcggtaagaccggtaaaggcggaaatccaggaggcaggccctgcatgcctgataacatcttattcatgacatcactcatttcttacgagataagaacagtgtatgcgtatgtctgtagaaagagcctgttcaatcgaacggaatatctgacaagcatgccggaaggacagagaaaaatcgtgtaataaaatgtgacatattcgtatatgaacggaaaaatttcatgtaatcttgagagattaataaaaaaatgataaaaacttttaatatttacagatccctttgtaccagtaatgaaagcgtatacaaagtagattgattaatctaaattgtctaataattataaaaatgctgttgacactgtctgcaaacgggcgtaatatgagttcaaacaaaaataaataaatgattcacgctaaaaagaaaaatcataaaacactgaaaaaacaaacaaatgaaggttcttttttaataaaagagctgccataataaaaagcgcagaagaggataagtagctttgctgaagtttttcacagagagccggtaacgctgagagccggtaaaacaaatcaaagtgaactcccctcagagtgccggtctgaaatgtaaagagtaggactcggccgagtgaacacaatgtttactcgttatcaaaacggataatcattatccatgagacggtctgcatatgaccgtaaacaagggtggtaccgcggaaagcaaagccttttcgccccttttggctatcgcatgaaatgcttggctgaatgtgggtgggaaggcttttttatttgcgtcagccggcgctgcgttttatgaattggattttagaaaggaacattgaaaaggaggaactgaaaatgggcacaaatgtacaggcggattctttgtctgccgaatgtacaaaaacaatgaacggggctctgatgctgattgaatcattaaagaaagaaaatgtcgagatgatcttcggctatccggggggagccgtccttccgatttacgataaactgtatcaatcaggattggttcacatcctgccccgccacgagcaaggcgcgattcatgcggcagaagggtatgcgagagtctccggaaagccgggggttgtgattgctacttccggacccggagcgacaaatttagttaccggtcttgcggatgcgatgattgattcattgccgctcgtagtgtttaccggtcaggtggccacttcggtcatcggcagcgacgctttccaggaagccgacattttaggaattacgatgccgattacgaaacacagctaccaagtccgccgtccggaagatctcccccgtgtgattaaagaggcgttccatattgccacgacgggaagaccgggcccggtattaattgatataccgaaggatgtcgcagcatttgaaggagagttcagatatgatcacgagatcagccttccgggttatcagcctgtaaaagagcctaactatctgcagatccgaaagctcgtggaagctgtcagcagtgcgaaaaagccggttattttagccggagcgggtgttttgcacggtaaagcttcagaagatttaaaaaattatgctgaacagcagcaaatcccggtagcgcacacgcttctcggtctgggcggtttcccggcagaccatcctctttttctgggaatggcggggatgcacggcacatacacagcgaatatggcgctttaccactgtgatttgttgatcagcatcggagcgcggttcgatgatcgtgtgaccggaaatctgaagcattttgcaaaatcggccaaagtagcgcatatcgatattgatcctgctgaaatcggaaaaattatcgaaacgcagattccggtggtcggcgacagtaaaatcgtccttcaggaattattgaagcaaaacggaaaacagggacagacagaggaatggaaacagcagctttcagaatggaaagaagaatatccgctttggtatacagacaacagagaagagggcttgaaaccccaaaagctgattgagtatattcaccaattcacaaacggtgaggcgattgtggcgacggatgtcggccagcaccagatgtgggcggctcagttttatcctttccgaaaggctgataagtgggttacctcggggggactaggcacaatgggcttcggccttccggcggctatcggagcgcagctggccgatcgtaacgccacggtcgttgccatcctcggagacggcggttttcagatgacccttcaggaattagatgtcatccggcagctgaatcttcctgtcaaagtggttatcttgaacaacgaatgtctgggcatggtcagacagtggcaggaaatcttctatgaagagcgctattctgaatccaaattctcggcgcagcctgactttgtcaaattgtcagaagcctacggcattaaaggcgtccggatttcatcggaggaagaggcggaagaagagcttaaaaaggcgctttcatcaaaagaaccggccgttattgacgtccgggtcgccaaaagcgagaaagtattcccgatgattgcgccgggtaaaggacttcatgaaatggtgggggtgaaaccttgaaacgcattatcacattaacggtggtcaaccgctcgggagtattaaaccggatcaccggcctgtttacaaaaagacactataatatcgaaagcatcactgtaggccacacggaaacaagcggtgtttcaaggattacatttgtcgtccatgtggaaggcgaaaatgacgtagagcagctgacaaagcagcttaacaaacaaattgacgtcctgaaagtgacggatattacaaaccaatcgattgtacagcgtgagctggcattaatcaaagttgtttccgcaccgtcggccagaacggaaatcaatggaatcattgagccgttcagagcttccgtcgttgatgtctcaagagacagcgtcgtcgttcaggttaccggcgaatctaataaaatcgaagcgctcatagagctgctcaaaccctacggcattaaagaaatcgcgagaacgggcacaacggcttttgcgaggggaacccagcagaaggcgtcatccaataaaacaatttcaattgtataacacaaaaaagggagagattaaaatggtaaaagtatattataacggtgatatcaaagagaacgtattggcaggtaaaaaagtagcgattatcggttacggttcacaaggtcacgcacatgcgctgaacttaaaagaaagcggaattgatgtcattgtcggcgtcagacaaggaaaatcatttacacaggcccaagaagacggtcatcaagtcttttcggtaagagaagcggctgcccaggctgatatcattatggttcttcttccggatgaacagcagcaaaaagtatatgaagctgaaatcaaagatgaattgacggcgggcaagtcattagtattcgcacacggatttaacgtccatttccatcagatcgtgcctcctgctgatgtggatgtattccttgtcgcccctaaaggaccgggacaccttgtcagaagaacatatgaacaaggcgcgggcgtaccggcattgtttgccatctaccaggatgtatcaggcgaagcgaaagatacggctcttgcttatgcaaaaggaatcggcggagcgcgtgcgggcgttcttgaaacaacatttaaggaagaaacggaaacggatttgttcggtgagcaggccgttctgtgcggaggtttaacggcgcttgtcaaagcgggttttgaaacgctgacagaagccggctaccagcctgaactcgcatacttcgagtgtctgcacgaactgaagctgatcgtagacttgatgtatgaagaaggattggcgggcatgagatactctatctctgatacggctcaatggggagattttgtctcagggccgcgcgtagtcgatgcgaaggtaaaagaatcgatgaaacaagtattaacggatattcaaaacggtacattcgcgaaagaatggatcgtggaaaaccaagtgaaccgtcctcgtttcaatgcgatcaatgcaagtgaaaacgagcatcagattgaaaaggtcggcagacagcttcgtgaaatgatgccgtttgtcaaacaaggcaaaaagaaggaagcggtggtctccgttgcgcaaaattaatgttttcgacacgacccttcgtgacggtgaacaatcccccggggtcaacctcaattcccgggagaaactggcgatagccaagcagcttgaaagactcggggtggacattattgaagcgggatttcccgcttcatcccgaggtgattttttagccgtgcaggaaatcgcaagaacgattaaaaattgttcggtaacagggcttgcccgatctgtcaaaggtgacatcgacgcagcctgggaagcactgaaagacggggccagcccgcggattcacatctttatcgccacttctgacattcatctgaagcataagctgaaaatgacgcgggaagaggttaaggaaaaagcggttgaaatggtgaagtatgcaaaagaacgctttccgatcgttcaatggtcagcagaagacgcatgccgcaccgaacttccgtttctggctgaaatcgttgaagaagtgattgatgccggcgcgagcgtcatcaacctgccggacactgtaggttacctgacgccggatgaatacggaaacatctttaaatatatgaaggaacacgttccgaatatcagccgggtaaagctttcagcccattgccacgatgatctcggaatggcggttgccaactcgctttcggcaattgagaacggcgctgatcaaattgaatgcgccattaacggcataggagaaagagccgggaacgccgcgctagaggaaatcgccgttgcgcttcatgtcagaaatgacgcgcatcaagccgattcatctcttaatcttcatgaattgaagcggacgagtgatcttgtcagcaaactgacgggtatggccgttccccgcaacaaagcaatcgtcggagataacgctttcgcacatgagtccggcattcaccaagacggtttcctgaaagaaaaatcaacatatgaaatcatttcgccggaacttgtcggcgtgactgctgatgcgctcgtactcggaaagcattccgggcgccacgcgttcaaagaccgcctgaatacgcttggattccagtttgatagtgaggaaatcaataaattttttacgatgtttaaagaactgaccgaaaagaaaaaagaaatcaccgatgatgacttgatttctcttattttagaagaaaaagtgacagacaaaaaaatcggctatgaatttttgtctctgcaagtgcattacgggacgtctcaggtgccgactgcaacagtctctttaaaaaatcaggaaaacgaacagctgattcaagaggcggcaacgggggcgggcagcgtagaagccgtttataatacgctcgggcgctgcatcgataaaaatattgaactgacagactaccgcatccaatccaaccggaaaggcgaagacgcgctggctcaagtttttgtcagagtgaccgtgaacggaaaagaaacatcagggcggggaatcgcgcaggatgttctggaagcttctgctaaagcttatctgaacgccgtgaaccggcaattggtgctggattgcaatatagacggattaaagagacagactgcggtcggctcgtaatagaaaggagaacgtttgatttgaaaaaacgcattgctttgctgcccggtgacggaatcggaccggaagtggcggaatcagcggcagatgtattgaaaagcgttgccgaacaattcggacatgaatttgaatttgaaaacggactgatcgggggagcggctattgacgcccaccaaaacccccttcctgaggagacggtggctctttgtgaaagatccgacgccatcctgctcggggcagtcggcgggccgaaatgggaccaaaatcctccggagctcagaccggaaaaaggcctgctcggcatcagaaaaaaactcggcctgtttgccaatctgcgtcccgtgaccgtatttgaaagcttgtctgaggcgtctccgctgaaaaaagaatatatcagcggcgtcgactttgtaatcgtcagggaactgacgggcggcctctatttcggagaaccgagcagacagtatgtcaatgaagcgggagaaaaggaagcggtcgatacccttttttataagaaagaagaaatcgcacgcgttgtcagagaagcctttaagatggctgccggcagaaaaggaaaagtgacgtccgttgataaggcgaatgtgctttcttcaagcaggctgtggcgtgaaacagcggatgaaatcgcaaaagaatttcctgatgtgacgcttgaacatatgcttgtcgataatgccgcgatgcagctcatctacgctccgagccaatttgacgtcatcgtaactgagaatatgttcggcgatattttaagcgatgaagcctccatgctgacaggctcgctcggcatgctgccgtcagccagtttatcaagttcaggtcttcacttgtttgaacccgtgcatggatctgcgcctgacatcgccggtaaagggatggcaaatccgtttgcggcgattttatcagcggcgatgcttttgagaacatctttcgggcttgaaaacgaagcgcaggcggtggaaaaagcggtcgcaaaggtgcttgcagatggcagccgtacacgtgatatcgcccgggacggccaatatgccggaacgcatgacattactgaaaaagtaaaagccgcattagccggctcgaatacaaaatctatagtgtgacgctttaaagaaagcggtcttagttcataggtagagggaggaaacaaagatgatgcctcgaacaatcatcgaaaagatttgggatcggcatgttgtaaaaagcggtgaaggaaaacccgaccttctctatattgatctgcacctcattcatgaggtgacgtctcctcaggcgtttgaagggttaaggcagaagggaagaaaggtcagacggccgcagaacacattcgcgacgatggaccacaatattccgaccgtcaaccgttttgacattaaagatgaagtcgcaaagcgccaagtaaccgcgcttgaacggaattgcgaggagttcggcgtccgtcttgcggatcttcacagcgcagaccaggggatcgttcacgtagtcgggcctgagcttggtctgacactaccggggaaaacgatcgtttgcggagacagccatacatcgactcacggcgcattcggagcgcttgccttcggtatcggcacaagtgaggtggaacatgttctttccactcagacattgtggcagcagcggccgaaaacgcttgaaatccgcgttgacggaacgctccaaaaaggagtgaccgcgaaggatgtcatcttgtcggtcatcggaaaatacggggtgaaattcggtaccggatatgtcattgaatacaccggggaagtattcagaaacatgtctatggacgaacgcatgacggtctgcaatatgtcaatagaagcgggagcgcgggcgggactgatcgctccagatgacacgacgattgaatattgtaaaaaccgtaaatacgcgccaaaaggcgaggaatttgaaaaagccgccgcagaatggaaagcgttaaaaaccgatccgggcgccgtatacgatcattccatcgtgttagacggcagcgagatttctccaatggtaacatggggcgtcaatcccggtatggttcttccggtcgatgcccaaataccggcgccggaaacgattgattctgaagacggtaaaaaagaagccatccgcgcgtacgaatacatgggaatcgcaccgaatcaaaaaattgaagatattaaagtcgagcatgtgtttatcggctcctgtacaaattcgcggatgaccgatcttcgccaggctgcggatatgatcaaaggccgaaaagtcgccgacagcgtcagagccattgtggtgccgggttctcaaagcgtgaaacagcaggccgaagaagaagggctgcaccgcgtgtttctcgaggccgggtttgaatggagagaatcaggctgcagcatgtgcctcagtatgaacaatgatgtcgtgcctgaaggggaacgatgcgcttccacttccaaccgcaacttcgaaggcagacagggaaaaggcgcgagaacacatcttgtcagtccggcgatggcggcaatggcggccattcacgggcatttcgtcgatgtaagaaagttttatcaagaaaaaacagttgtgtaaggagtgcgcgaaaagatggaacctttaaaaacgcatacgggaaaagcggccgtcttaaaccggatcaacgtcgatacggaccagattattccgaaacagtttttgaaaagaattgaaagaacaggatacggcagattcgcgttttttgattggagataccttgagaacggtgagcctgatcctgaatttgaattaaaccgcaaagtctatgaaggcgcgtccatattaattgccggagagaatttcggctgcggatcatcccgtgagcacgctccttgggcgctggatgattacggcttcaaaatcatcattgctccgtcatttgccgatatttttcatcaaaactgttttaaaaacggtatgcttcccatccgtatgccgtatgatcagtggaaaaaactcgccggtcaatatgaaaatcagtctcttaacatgacggttgacttggaaaaccagctcattcacgacagtgaaggaaaagagatttcatttgaagtcgatcctcactggaaggaaatgctgataaacggctatgatgaaatttcattaacgcttctgctggaagacgacatacagcagtttgaatcgaaaagaagttcatggcttcaagcctgaaaaaagccgaccggcatctgtccggcggctttttttaccgtgcgcaccatcctttcttgtgtttcctgacgcgtgttgatacacttgaaaaaaatagcgcctgaaaggaaataaagtatgacgcatgacaagaaaaaagctgatatcattcctttcccccgtctgaaagaacgcttggttgataaagggatggccgccatgaaggataaacagtatcaggaggccctcgaactgttctcagaggcggtaagccacggcgataccgagtccgacgtacatttaggcatggcgatttgttttctggaactcggggaattggaagaagcaaaacaagtttgcgagaaaatgctgaatgaagggtacggccattatttcaccgtactgcaggtgtacatgaccattttaattcagctgaaacaatatgaagaagtcaaaagcacaattgaagctgtgctggaagaaaaccagctgcccgcagaaagtgcggagcaattctaccggctgctcgaattcagccgcaaaatgaccgatcccgaccagcaggatgaagcgtgggaggaggaatacgaggacattcttgatgcggaaaaagtgctgaacagccccgctgaacaaatgaatctgattcattctctcaaagaccgcaatattgcaaaatacacgggtctcttaaaaacgattcttcaagatccgggcgcacatccgcttatcaaaacgatgattttgacgctgatggcggagcacgactacagcaagccggtccatattacaaaattcggcgattcaatgaccgcggttccgagtgaaacggttcagcctgatgcggctccgattttgcatcgcgttctccgggtgcttgatgaaacgctcggcaatgaaaaccctacattatacgctgccgtcgaggagctgtggagaaggcatctgtacgtcctgcacccttttatgccgaagtttttgaacgcagatttatgggcggcggcgcttcataaggtcggttacgagatgcacggcattgacattgagccggaggaacttcatatgatgtacgagtttgacagccgcgaacttgaagaagcctgcacgatgattaaggatattgaagaaatttcttatttgtaaatcacaccatatagttgaaagcggtaggcgttatgttataatatagtggttgtatttatgtatagcggtttaactgaaatgagaattacggttggacaggctgccagttcattacataatgattctgattcaaagcggttttttctttgacaaagccgcggattgctttagaatggaagaccgacacaacctgaatagatttttggagggaaacacatgtctgtaaaatgggaaaaacaagaaggcaacgaaggcgtattaacggttgaagttgatgcggatacgttcaaaacagctcttgatgatgcatttaaaaaagtagtaaaacaggtttctattcctggattccgcaaagggaaagttccccgcggtttattcgaacagcgtttcggcgttgaagctctttaccaggatgctttagatattttacttcctgtagaataccctaaagcggttgaagaagccggcattgaacctgtagaccgccctgaaatcgatgttgaaaaaatcgaaaaaggcgaaagcttgattttcactgcaaaagtgactgtaaaaccggaagtgaaacttggcgactacaaaggcttaggaatcgaaaaagatgacactgccgttactgacgaagatgtacaaaacgaacttaaagcgcttcaagagcgtcaggctgagcttgtcgtgaaagaagaaggcgctgttgaaaacggcgatacagtcgttcttgacttcgaaggtttcgttgacggcgaagcgtttgaaggcggaaaagctgagaactactcacttgaagtaggatcaggttcattcatcccgggcttcgaagagcagttaacaggccttgaagcaggcgctgaaaaggatgttgaagtaacattccctgaagagtaccacgctgaagagcttgccggaaaaccagctgttttcaaagtgaaaattcatgaaatcaaagcgaaagagcttcctgagcttaacgacgaattcgcaaaagacattgacgaagaagttgaaacgcttgctgaattaactgagaaaacaaaaaaacgccttgaagaagcaaaagaaaacgaagctgacgctaaattgcgtgaagagcttgttctgaaagcatctgaaaacgctgaagctgatgttcctcaagcgatgatcgacactgagcttgaccgcatgctgaaagaattcgaacagcgtctgcaaatgcaaggcatgaaccttgagctttacactcaattctcaggccaagacgaaaacgcgttaaaagagcaaatgaaagaagatgccgcaaaacgcgtaaaatcaaacctgactcttgaagcgatcgctcaagctgaaaaccttgaagtaacagacgaagaagttgaagctgagctgactaaaatggctgaagcttacaacatgccggttgaaaacattaagcaggcaatcggttcaactgacgcgatgaaagaagatttaaaagttcgaaaagcaattgattttcttgtagaaaaccgttaatatggttcataataatagacataataaaacagggcgcgattaattcgtgccttgttttgtacaattatgatataactctttttcttggggcaagatagtcattgccgggctgtttttcgtcatacatatagaatgtgcaagtgcgaaacacattgttaccgtcttactggaaagtatggtaaaatgcaatacatactcgatcgtagcaagaaccgttttcttttgcccttcaggtaaaagaaaaagtgagacaagattaaggggtgaaagaatgtttaaattcaacgaggaaaaaggacaattgaaatgctcgttctgcggaaaaacgcaagatcaggttcgtaagctggttgcaggaccgggtgtatatatatgcgacgaatgtattgagctctgtacagaaatcgtagaggaagagcttggtacagaagaagaagtcgaatttaaagacgttccgaagccgcaggaaatccgtgagattctgaatgaatatgtcatcggacaggatcaggcgaagaaatcacttgcggttgcggtatacaaccattacaaacgcatcaattccaacagtaaagtggatgatgtcgagctttctaaaagtaatatttctttaatcggaccgactggaagcgggaaaacacttcttgcccagacgcttgcgcgtattctgaacgtgccgtttgcgatcgcggacgctacatctctgactgaagccggatatgtcggtgaggacgtggaaaacatcctcctcaagctgattcaggcagcagactatgatgtggaaaaagcagaaaaaggcattatttatatcgatgaaatcgataaagtagcgcgaaaatctgaaaacccgtccattacacgcgacgtatcaggcgaaggcgttcagcaggcgctgctgaaaattcttgaaggaacggttgcaagcgtgccgcctcaaggaggacgcaaacatcctcatcaggaattcatccagatcgatacgacgaacatcctgttcatttgcggcggtgcatttgacggcatcgaacaaatcatcaaacgccgtctcggacaaaaagtcatcggcttcggctctgataataaagcggcagacctggaaaaagaagaactgctttctaaagttcttcctgaagacttgctccgtttcggtctgattcctgaattcatcggccgtcttcctgtcattgcaagccttgagcagcttgacgaaacggcactggttgaaattctgactaaaccgaaaaacgcactcgtcaaacaatacaagaaaatgttagaacttgatgatgtcgagcttgaatttgaagacgaggcattatctgaaattgcgaaaaaagcgatcgagcgtaaaacaggcgcacgcggcctgcgttctatcattgaaggcatcatgcttgacgtcatgtttgatctgccgtcccgcgatgatattgaaaaatgtgtcattaccggagcgacagtcgcagatggtgaagcaccgcgtcttgtattaaaagacggcacagttgtcggccaagataaaacatcagcataacatgacaaaacctcctgactcgaattgatcaggaggttttttttcttgtcctgacccttctgaaaatgtttattccgggctttgctgggagatactagcggacagaggaatgaattggatacataaatcgttttttcaggagggaccagcatgagttggacagggatcgcattatttgtacagctgtttttcgggatagtcatcggattatatttttggaatctgctcaaaaaccagcgtacacaaaaagtgacgatagataaagaatcaaaaaaagaaatggaacagctgcgcaaaatgcgcgccatcagtttatcagaacctttatcagaaaaggtgcggccgaaaagctttcaggacattgtcggccaggaagacggaattaaagcgttaaaagcagcgctttgcggaccgaacccgcagcacgtcattatttacggtcctccgggagtcggaaaaacggctgcggcgcggctggtattggaagaagcgaaaaaacataaacagtcaccgtttcaaaagcaggctgtttttgttgaacttgatgcgacgaccgcgcggtttgatgaacgggggattgccgatccgcttatcggttcagtgcatgatccgatttatcagggagcgggagcgatgggccaagcaggcattccgcagccgaaacagggggctgtgacccatgctcacggcggggtattgtttattgatgaaatcggcgagcttcatccgattcagatgaataaaatgctgaaggtgcttgaagatcgaaaagtatttttagacagtgcgtattacagtgaagaaaatacgcaaataccgaatcacattcatgatatttttcaaaatgggcttccggcagatttccgtttgatcggagcgacaacgagaatgccgaatgaaattccgccggccatccgttcgcgctgtcttgaagtatttttccgcgagctggaaaaggatgaacttaaaatcgttgcgaaaaaagcagccgacaaaattcagaaagagatttctgacgaagctctcagtgtgctgaccacatatacgagaaacggacgtgaagccgtcaatatgatccagatcgccgccggcatggcggtgactgaggacagaaaagaaattacgacagaagatatagaatgggttgttcattccagtcagcttacacctaaaaatgagcagaaaatcgccgatgaaccgcaagtcggcatcgtgaacggacttgccgtctacgggccgaacagcggcgcattgctggaaattgaagtgaatgtcacacctgcgcaggacaaaggaagcctgaatatcacgggaattgcagaggaagaaagcatcggcagccaatcgaagtcgatccgccgcaaaagcatggcgaagggatctgtagaaaatgttctgacggttctgcgcacaatgggcatcaaaccttcagactatgacattcacgtcaattttccgggcggaggcccgattgacggaccttcagcaggtatcgcgatggccgcggggattttttccgcgattcaccgcatcccgatcgaccatacggtggcgatgacgggagaaatcagcctgacggggcttgtcaaaccgatcggcggcgtcattccgaaaattaaagccgcaaaacaggccggagcaaaaacggtcattatcccatatgaaaatcagcagtccattctgaaacgaatagacggaatcaccattaaagcggtaaaaacgttccaggaagtgctggacgtcatattggttgaccctccttcagaacaaaaaccgtttgatatccaaatgaataaagaatccgtataaaccccatttttataatggggtttttttatggaggacatcttttcctttttcagaacagaaagaaagggtatactacgaagagactgttttatatacagggcaggcggataagccggttttgcccgatcccggaattgtacaacgatgaaaaagttgtattataatggttcatactaaagtcacggaggtgtcagtcacatggcagaagatacaaaacgcagcatcccgctcctccctttaagaggcttattggtatacccgacaatggttttacatttagatgtaggccgtgacaagtcggttcaggctcttgaacaggcaatgatgcatgatcatatgatttttttagccactcagcaggatatttcgatagacgaaccgggtgaagaggatattttcgccgtcggcacttatacaaaaattaaacagatgctgaagctgcccaacggtacgatcagagtgcttgtagaaggaattcagcgggcgcagatccttgaatacaccgagctcgaagattatacttcggtcgatatacagctgatgcatgaggatgattcaaaagacgtggaagacgaagcgcttatgcggacgctgctggaccattttgaccagtacataaaaatttctaaaaaaatctccgcagaaacgtatgcggctgtgactgatattgaagagcccggcagaatggcggatatcgtcgcttctcatctcccgctgaaattaaaggacaagcaggacattttagaaacggcggatattaaagaacgtctgaataaggtcatccgctccattcataatgaaaaagaagtgctggagattgagaaaaaaatcggccagcgcgtcaaacgttcgatggaacgcactcaaaaggaatactacttgcgtgaacagatgaaagccattcagaaggagcttggcgacaaagaaggaaaaaccggcgaagttcagtcgctcacggaaaagatagaagaagcaggcatgcctgagcgtgtcaaagaaacggcgcttaaggaattaagccgttacgaaaaagtgccgtcaagctcagcggaaagctctgttatccgcaactatattgactggctcatcgcccttccgtggtcggatgaaacagaagataaacttgatattaaaaaagccggggaaatcttagataaagagcaccacggcttagagaaagtgaaagagcggattttggagtatttggccgtgaaacagctgacgaaaacgctgaaagggccgattctttgtctggccggacctccgggagtcggtaaaacatctcttgcaaaatcaatcagtacgagcatggggcgccgttttgtgagaatttcactgggcggagtgcgcgatgagtctgaaatccgcgggcaccggcgtacatacgtcggagcgatgccgggccgtattatacaggggatgaaaaaagccggcaaacaaaatccggtttttctcctggatgagatcgacaaaatgtcgtctgatttcagaggcgatccgtcttcagcgatgcttgaggtgctggatccggaacaaaacagcacattcagcgaccactatattgaagagacgttcgatttatcgaaagtgctgtttatcgcgactgcgaataaccttgcttccatcccgggccctctcagagacagaatggagattatcagcctgtcaggctacactgaaaacgaaaagctggagatcgtgaaggaccacctgcttccgaaacaaatcaaagagcacgggctcacaaagagcagcctgcagattcgggaccaggcgattacggacatcatccgctactacacgagggaagccggcgtgagaacgcttgaacgccagattgccgccatttgccgaaaggctgcaaaagccattgtgtctgaggagagaaaacgcattaccgttacagagaaaaatctggccgactatctcggaaaacggatattcagatacggacaggcggaaaccgaagatcaaatcggggttgtcacggggcttgcgtatacgacggtcggcggagatacgctgtcaatcgaagtgtcattgtcaccgggaaaaggaaagctgattctgaccgggaagcttggagatgtcatgcgggaatcagcacaggccgctttcagttatgtccgctcgaaagcggaacagttcggaatcgacccgaaattccatgagaagtatgacattcatatccatgtccctgaaggagcggtgccgaaagacggcccttctgccggaattacgatggccacggcgctcgtttcagcattaacggaccgtgcggtaaaacgcgaagtcggtatgacgggagaaattacgctgcggggccgcgtgcttccgatcggcggactgaaagaaaaggcgctcggcgcgcacagagcgggcctgaccactattattgcgcctaaagataacgaaaaagatatagaggatattccagaaagcgtcagagaaggactgaagtttatattcgtttctcacctggatgacgttttggaacatgccttagtaggagagaagaaatgaaagtcacaaagtcagaaatcgtgatcagcgcggtcaaacccgaacagtaccctgatggggggcttccggaaatcgcgctggcgggaagatcaaatgtaggaaagtcatcttttatcaattcattaatcaatcggaaaaacttggccagaacgtcatcaaaaccggggaaaacacagaccctaaacttttacatcatcaatgatgaattgcattttgtcgacgttcccgggtacggatttgcgaaagtttccaaaagcgagcgggaagcatgggggagaatgattgaaacctatatgacgacccgcgaagagctgaaagcctgcgtgcagattgtcgatctcaggcacgcgccgtctgctgaagacgtgaacatgtatgaattcctgaagtattacggcattcccgtcatcgttatcgcgacaaaagcggataagattccaaaaggaaaatgggacaagcacttaaaggttgtcaaacagacgcttgatatggatcctgaagatgagctgattttattttcctctgaaacgaaaaaaggcaaagatgaagcatggggagccattaaaaaaatgatcagccggtaatgaaaaacccaaaacgcagtgcgttttgggttttatcgtatagttttgttccgcttgataaacaataataaaaggctgattccgatgaaaacatacggccagtatgttttgaagtgttccgtcggaatatggacggactccagccacgccgtaatttgtttaaagaagtataaaaagagggaaaaaccaatcatggcaaccgcttcgtatacatattcttttctggctgccgcaaataaggagaacccgaagacgaagagaatcatttcaaaatctcccggccaccatgagagctcaggtttggcgaaaaagtgtaaacctatgccgaaaagaagcatgccgatcaggacgtgaggcccggccgcttcctttttgccctgatacaagagcacagcgcccaaaagcataaggagcaccggccattccccctgattcgcaaacaggtgaacctgtccgctctgaagccatgcgaataatgaagcggcaagcagaagtcccggtaataaaattgatgtttttttcatcctgtcacctacccgcagtaaaggatttttagtatgatgattacagtggaaacgagctttttatactatagcataacatttttgaaatctgttcacattttcccgaagaaactatgttataatcattataaataataaattctatgttagaatgattataaataaattgcgatgtacgggggtgcatgaaagcgatgcatattcttgttgtgggagtagattataaatccgcccctattgaaatacgcgaaaaaataagttttcagccggatgagcttgcagaagcgatgctccgtttaaaaggagaaaaaagtgttcttgaaaacattatcgtgtcaacctgcaaccgcaccgaaatatatgcggtggtcgaccagcttcataccggccgttattatataaagacatttttatccgaatggttctcgctgccgaaagaagagctgtctccgtttctgaaattttatgagagcgacgcggcgatcgagcatttattccgtgtggtgtgcggcttggattccatggtcatcggggaaacgcaaatactcggccaggtccgctcaagctttaaaacggcgcaggcagagaagacgatcggcaccgttttcaatgagctgtttaaacaggcggtgaccgtcggcaaacgcacgcatgccgaaaccgatatcggcgccaatgccgtttccgtcagttacgccgccgttgaactcgcgaaaaaaatcttcggctcattgtcaaataagcacattttgattctcggtgcgggaaaaatgggcgagctcgccgcagaaaacctgcacggtcagggcatcggcaaagtaacggtcatcaacagaacgtttttgaaggcaaaagcgcttgctgaccgtttctccggagaagcgcgcagcttaaaccagcttgaacatgcacttgctgaagctgatattttaatcagttcgacaggcgcaagtgatttcgtcgtgtctaaagaaatgatggagagagcgggcagacagcggaaaggccgcccgttatttatggtggatatcgctgtgccgagagatctcgatccggcgctgaacgatcttgaaggtgtttttctgtatgatattgatgaccttgaaggaatcgttgaagccaacttacaagaacgccgtgaaaccgctgaaaaagtcgagctgtttattgaagcggcaattgttgagtttaagcagtggcttaatacgctcggcgtcgtgccggtcatttcggcgctgcgtgaaaaggcgctgtccatccagtccgatacgatgcagagcattgagcgcaagctgcctcatctgacggtaagagagaaaaaacttctcagcaaacatacgaaaagcatcattaaccaaatgctgcgcgacccgattctgaaagcgaaagagcttgcggctgaagcggattcagatgaaaagctgaagctgtttatgcagatattcgatattgaggaagaggccggccgccagctggacaaaagcctggataaccgccagacggttcattcgtttcaaaaggcagaagcaaaaacgggcttacgtccgcttgtaagtgagtgagggctgtatgattgatacagcaatggcaagacttaatgaagcgacaattgttatttatgcagtaagcgtccttttttactttatagattttcttcaacacaaccggaaggctgggaaaatggccttctggttgctttctattgtctggactctgcaaactgtctatctttcttatttcatgtggcagacgggcagatttccggtcttgaatattacggaggccctttacttttatgcgtgggtgcttgtcacgctctcacttgtggtcacgcagattctgcgcgttgattttatcgtgtttttcacgaatgtcatcggtttctcgatgattgcgatccatacgttttcaccgacggatcagcattcggccgctttttccggccagctggtctcggagcttttggtcattcatattacaatggcgattctgtcttacggcgctttttccctttcttttgtcttttcgcttctttatcagtttcaatactctttattaaagaagaaaaagtggggaaaatggctgttgagaattgaagatttgtcaaaacttgattatatggcttacgttttaaatgtcatcggggttccgatgctgctgttgagcctgatattaggcgtgatctgggcgtatgtgtcgctggaaacgctgtactggtttgattcaaaagtgctcggctcgtttattgtgctgcttttatacagctactatttatatatcagaatgattaaggaactgcagggaaaagtggcggcgttatggaattcagcatgttttctcgtgctgatgattaattacttcctgctcggaagcctgtcgcaattccattggttcagttaacgcacgcgcccaaacagattcgggaggaaagaaaatgagaacgattaaggtaggttccagacggagcaaactggctatgacccagacaaaatgggtgattaacaaactgaaggaattgaacccttcctataactttgaaatccgggagattgtcacaaaaggcgaccgcatcctcgatgttacactgtcaaaagtgggcggcaaaggtttgtttgtcaaagagattgaacaggcgctgctgcatcaggagattgatatggcggttcacagcatgaaagacatgcccgccgttttgcctgagggtcttgtcataggatgcataccgaaacgtgaggatccgcgtgatgcgctgatttcaaaggggcatcaaaagctggacgacataaaagaagggggcatcatcggcaccagcagtttaagaagaagcgcccagattcttgctgaacgccctgatcttacaattaagtggatcagaggcaatatcgatacgagacttcaaaagcttgaaacggaagattacgatgctattattttagcggctgcgggactttcaagaatgggctggaaagatgatgtcgtatctgaatttctcgaaccggcccgctgtctgcctgcggtcggccaaggcgctcttgccattgaatgcagagagtcggatgaggagcttttgaagctgtttgcgcaatttaccgatgagtatacgcagcgcacggtggcagccgaacgggctttcttacacgcgatggaaggcggctgccaagtgccgatagccgggtatgcgtccgtcaatgaccgggatgaggttgaattggtcggtcttgtcgcgtctccggacggaaagacgatttataaagaaacagcggcgggacatgatccggaagaaatcggtaaacgctgtgcggcgatgatgtctgaaaaaggagccaaagcactaatcgacagcgtaaaacaggagctcgatcaggatggcaaatgaccttcctttacaaggaaagaccgtgcttgtcactcggaacaaaagacaggccgctccgttccgaaaaaaagtggaggcgctcggcggaacggctgtttccgcttcgctgatcgcttttcaggaagcgctcccggatgaatgtgcggacagtctgcgggaagacctttctgagccgggatggcttgtgtttacaagcgtaaacggtgtccggttctttttttcctatcttgatcgtcacggtcttgcgctttcgggacggaaaaaaatcgcagccgtcggtgaaaagactgcgcgcgccctgaaagagcggggagcccggacggatgcgatgcctgacgagtatgtggcggaatgtctggctgatactttaaaacggcacgcatcagctgccgaacccatttcagtgataaagggcaatttatcacgcgatgtcataaaagcggagcttgagccgcttggctatcaaataagggaatgggtgttatacaataccattcaggatgaaaaaggcatggacgagctgagacgggctgcatcccgctctcattttgattttattacgtttaccagctcatcggcggtgcatacgtttatgcacgcggtcggagacggagaaaaagcgtgggaaaacagcggtgcgagctatatcagcatcggccctttgacagagaaagcgctcttggaatacgggatctcatcccatgtgcctgacacttatacgattgaaggcatgctggacgtcatgtgcagcatgtcgggaaaggattgataatgatgaatcaaacatttaacagacaccgccgtttgcgctcgaacgctgcgatgagagatttagtaaaagaaacacgtcttcacccctcagattttatttacccgttatttgtcgttgaaggactcgaaggaaaaaaagaagttccttccatgccgggggtttatcatgtatcacttgatttgttaaaggatgaaatggctgagctgatatcgctcggcattaagtcggtcatcgtttttggcgtgccggaagaaaaagacgcctgcggaacccaggcttttcacgatcacggcattgtgcagaaagggattgctgaaattaaaaagcattatcctgaaatgatcgtaatcgctgatacgtgtctctgtgaatacacggatcacggccattgcggcgtcgtgaaagacggagaaatcctcaatgacgagtcgcttgaactgctggctcagacagccgtcagccaggccaaagccggcgctgacatcatcgctccttcaaatatgatggacggttttgtcacagtgatcagggaagcgctcgacaaagaaggattcacgaatattccgatcatgtcttatgccgtaaaatattcaagtgaattttacggtccgttccgcgacgcggctgacagcacgccgcagttcggagaccgaaaaacatatcagatggatccggccaaccgcttggaagcgctccgtgaggctgaatcagacgcggcagaaggcgctgactttttaatcgtcaaaccgtctatgtcatacttagatattatgcgtgatgtgaaaaaccgccatcacctgccgctggtcgcatataatgtgagcggggagtattccatggtgaaagcggcagcccaaaacggctggattaaagaaaaagaaatggtgctggaaattttaacgagcatgaaacgtgcaggagccgatctgattatgacgtatcatgcaaaagacgcagcaagatggcttgctgagtaacgatttcatttgacgggagctgaggcagatgagaagctatgaaaaatcaaaagccgcttttaaagaagcgcagaaactgatgccgggcggagtgaacagcccggtgcgcgcgtttaaatcagtcgatatggacccgatctttatgcagcgcggaaaaggatcgaaaatttttgatattgacggcaatgaatatatcgactacgtcctgagctgggggccgctcattttgggccacacgaacgaccgggtcgttgaaagcctgaaaaaagtagccgagaacgggacaagtttcggagcatctactgaggtggaaaacgaactggccaaattggtcattgaccgtgtgccgtctgttgaaatcgtacggatggtcagctccggcacagaggcgacaatgagcgccctgcgtctggcaagaggatataccggccgcaacaaaattttgaaattcgaaggctgttaccacggccatggtgattcactgctgatcaaagcgggatccggagtggcgacactcggccttccggacagcccgggcgtgccggaaggaatagcaatgaatacgattaccgttccatacaacgacttggaaagcgttgcactcgcattccgggagtacggtgaagatattgccggggtcattgttgaaccggtagcaggcaatatgggcgttgttccgccgcaggaaggctttttacaaggacttcgcgacatgacggaacagtatggcgcgctgctcatttttgatgaggtcatgaccggttttcgcgtggattataactgtgcgcaagggtatttcggcgtgacgcctgacttaacgtgtctcggcaaagtcatcggcggcggtcttcctgtcggtgcgtatggcggaaaagctgatattatggaacgaatcgcgccgagcggtcctatctatcaggcgggaacattgtcaggaaatccgcttgccatgacagcgggacttgagacgttacagcagctcacacctgaatcttaccaagaatttgtgaaaaaaggcgatatgcttgaagaaggcatttcaaaagcagctgcagcacatggcattccgcacacgtttaaccgggcgggttcaatgatcggcttctttttcacaaatgagcctgtcattaactatgaagcagccaaatcatctgatttaaagctgtttgccaaatattataaagggatggctgatgcaggcgtatttctgccgccgtctcaatttgaaggattgtttctctccactgcgcatacaatggaggatattgaaaaaaccattcaagccgctgagaaagtgttccaggcgatcagccgctgatacggaaaagccgatgcaagcaagacttgtatcggcttttttcaatgcctccattatcatatttttccggattgcggcatacacctttagtgacatctaattgtatggattagatgaaaggaggatatgaacttgccgcataatcaccgattgcaattttctgttgaagaatcaatctgtttccaaaaaggacaggaagtttctgaattactttcgatttcattagaccctgacatcagggtgcaggaagtaaatgattatgtctcaattaaaggatcactagaacttactggcgagtacaacatagatcacagcagtcattttgaagagcttgatagggagctgaggcatgtagaggaagtgagggcgagggaggatggcacggccgagctcattcattgtttcccagtggacattacgattccgaaaaataaagtgagccacctcaatgatgttttcgtatttatcgatgcctttgattatcagctgacggattcaaggatcttaaccattcaggctgatttggcaattgaagggctgcttgaggaatccgagccaaaagagccggagatccctttgtacgtggcacctgaatttgccagagaagaaatgatcaatcttgccggacatcattcggaggacgaaaacgaaccagaattaatgatacgccatgagcctgaaatacctttgagtgtatcaaaagaagcagcacaagaaaccgagaagaacgaggaagaaaccccgcctttactcaggcaggaggaagaagagcaggaagcagccccgattctgagggagcgggaagaagaagagcaggaagcagccccgattctgagggagcgggaagaagaagagcaggaagctgctccgattctgagggagcgggaagaagaagagcaggaaactgccccgattctgagagagcaggaagaagaagagcaggaagcagccccgattctgagagagcaggaagaagaagagcaggaagcagccccgattctgagggagcgggaagaagagcaggaagcagccccgattttgagggagcgggaagaggaagagcaggaagcagccccgattttgagggagcgggaagaagaagagcaggagactgccccgattctgagggagcaggaagaagaagaggagcagggagctgccccgattttgagggagcgggaagaagaagagcaggaagcagccccgattttgagggagcgggaagaagaagagcgggagactgccccaattctgagggagcaggaagaggtgccgaaacctgtttcctttactgagcctcctcctcccgtttctttccaacacgaagaagagccggaagaagctgaggagcctgcaatcatgtcggctgtgaggaatgaacctgtatttgaggatgattcagcagaagtccaggaagagccaaaagatgatatcgaaaaggttttccctgcgttcactctgactccgcatgcagaaaaaccaaaaattgcggaacagcccttccttcaaaaagaagagcagccagaggccgagccgcttctccgtcagagcgatcatgaggcggcagaagacgaagatgagcctgcggtttttcaagaagagcaggcgcccgtttatcgcgagttcgttccggaacggcaggaagaggagttttacagcgctcctaagctgcttgaagaagaggctcatgatgaagaagggtttgaaattgaggtaaggaagatggcgcagccggaggaggaaaccgggaagcctctcgatttgtcttttcagttttccaaactgccgcctgaggagccggcgcaagctgaaccgcctgagccgcttaagtctgaaagaaagaatgaagaagcggcaccgggaaccgagcagaaggaaaatgacaactctcattacttgacaaaattatttacaagggaagaagaaaagttttcaagaatgaaaatttgtatcgtacagcagcaagatactatcgaccgggtgtgtgaacgatatgacataacaacccagcagctcatcagaacgaatgctttatcgtttgatgacgagcttgaagaaggtcagcttctgtatatacctgaatataataacagccatgcgtaagcacaaagaggccgtaaaaatgtggtgaatggaatggaagcagtccaatcagtgcttcaggaatacgggctggcggctgagtatattgagcctgtcagcccgcatgtttggaaggtctactcaaactacggcatttttgctttgaaacagctcaagccggcccgcagcagtgaatttacggatcttatgattgagattgaggagaaagggtaccgatcatttgtgccgatctgccgcacgtatgccggcgatttttttgcgggaagacagacggagaattcttattatttaatgccttggcttcagtacgatcaggaagaggaacgggatcaaaaacatgtttacctttttaaagaggtcgcgaagctccattctgcgactgtgcgggacatccaaatccggactgaagatatcagcggcttttatgaagcaacgaaaagagattgggaaaatgataagcttgtctatgaacaattcgccgaccgggcggaaaaagagtggtatctttcaccttttgaactgcaggctgttacgtatcttacagaaacggtttccgccgtcaatttcgctctggaacgtctggaagagtggtttgacgcggcaaaggatcatgacaagacgagagcggtgatcaaccacggcagcttatcgagccgccactttctgtataatgatgcgggatcgggctttttcacgaatttcgagaaagctgcgctgggccctccgcaaaacgacctgctcggcttttactccagaatgttcagaagctatccgaaagcatgcccggagtgtctggactggttttatacgtatcacaaatcattcccgctccgtgaagcggaaatcagcctgtttctcagctatatggcttatccgtccgccatgtacaaagtgctgaaacggtatcagaccggccaaaggggctctgaaaaagaagagtgcacgcaattattaagagcgttttggcagatgaaaaatgttgagccttttctcatgaaggttcatcagattgagcgggagaaaaaaataaaagcggaaaacgagtcctcttcataacgggactcgttttttttatatccattccaaatgcagggcgcacgctaaaaacagcaggatggcaagcagcaggacatcaaaagtcgtcggaaagaaaatcgtcctgatcccctgaaagatcgtaatcgggataatgacttgcacggatacaaggcggacctgtctggcccactgggggagcgaataagaattgaatttttttctcacgggcaattcctcctcacattcgcctttctatgtatcgtatgtaagggaaagggcggggtgcatgcccatttatgtatgacggcagcggtttttggaaaagatgattgacgaatcaaaaacacttttactataataaagaacataataaataagatcatgagctgatataaatacacctgctttgaacgggaagagtacaagaaagacgcatgaagagagagaagctactgtgctgaaaggcttcttatgctgtctcattggaaggtcgcccgggagcataatttcttgaacatacagtagagaaattcgggccgcacccgttatccgtttaagtgcatgaacaaatctgttcatgaaaaaaggtggtaccgcgaaagagcttttcgtcctttatcaggatgaaggctcttttttagttgctcagccatttctaaacatgctggagggttatcatggatacaaatgaacaaacaatgccgacaaaatatgatccgtctgcgattgaaaaaggccgctatgatttttggctgaaaggaaaatattttgaagcgggcggcgatcaaacgaaacagccatattctgtcgttattccgccgccgaacgtgacgggcaggctgcacctcggacatgcgtgggatacgacgctgcaagatatcgttacgcgtatgaaacgcatgcagggctatgacgtgctctggcttccgggcatggaccacgccggcatcgccactcaggcaaaagtcgaagcgaagctccgcgaacagggcacaagccgttatgacctcggccgtgaaaagtttttagaagaaacgtggaagtggaaggaagagtatgctgatttcatccgcagccaatgggctaagatgggactcggactcgattattcacgcgaacgttttactcttgatgaagggctgaacaaagccgtgcgggaagtattcgtcaagctgtacgagaaaggcttgatttacagaggcgaatatatcatcaactgggaccctgccacaaaaacggctttatccgatattgaagtaatttacaaagacgtacagggcgcgttttatcatttgcgctatccgttagcagacggttcaggctcaattgaaatcgcgaccacccgtccggaaacgatgcttggcgacacggctgtcgcggttcatcctgaagatgagcgctacaagcacttaatcggcaaaacggtgattctgccgattacaaaccgtgaaattccgattgtcggcgatgattatgttgatatggaattcggatcaggcgccgttaaaatcacgcctgcccatgacccgaatgattttgaactcggaaaccgccacaatttagagcggattctcgtcatgaatgaagacggaacaatgaatgaaaaagcgctgcaatataacggcatggaccggtttgaatgccgcaaaaaactcgtcaaagatcttcaggaatccggtgttctctttaaaatcgaagaccatatgcattctgtcggacatagtgagagaagcggcgccgttgttgagccgtacctgtccacacaatggtttgtcaaaatgcagccgctggccgatgctgcggttgaccttcagtcaaaagaagagaaagttcacttcgttccagaccgtttcgagaaaacgtacctgcactggatggaaaatatccgtgattggtgtatttcccgtcagctgtggtggggccaccgcatcccggcttggtatcataaagaaacaaaagaagtgtacgtcggccttgaggcgcctgaggacagtgaaaattgggaacaggattcagacgtgcttgatacatggttcagctccgcgctttggccgttttctacaatgggctggcctgatgaaaacgctgaagactttaagcggtattactcaaccgatgttcttgtaacgggatatgacatcattttcttctgggtatcccggatgattttccaaggtcttgagtttaccggcgagcgtccgttcaaagacgtgctgattcacggcttaatccgtgacgagcagggcagaaaaatgagtaaatcccttgggaacggcgtggacccgatggatgtcatcgacaagtacggagcggattccctgcgctatttcctggcaaccggaagttcaccgggacaggatctccgtttcagctatgaaaaagtggaatccacatggaatttcgcaaataaaatttggaacgcctcccgttttgcattaatgaacatggacggcatgacgtatgacgagcttgatctgtccggtgaaaaatcagttgctgataagtggatcctcacaagattgaatgaaacgatagaagacgtaacccagcttgcggatcgttatgaattcggtgaagtcggacgccacctgtacaactttatctgggacgatgtgtgcgactggtatatcgaaatggcgaagcttccgctgtacggggaagatgaagcggcgaagaaaacaacccgttctgttctggcatacgtgcttgaccagacgatgcgtcttcttcacccgtttatgccattcttaacggaagaaatctggcagcaccttcctcatgaaggcgagtcgatcacgatcagctcttggccggttccggtgccggaacatacggataaagaggcagcggcggatatgaaactgctcgttgaattaatccgttctgtccgcaatatccggagcgaagtcaacacgccgatgagcaagcaggttgagctttacattaaaacatctacggaagacattgccggccgccttgagaagaaccgttcttacgttgaacgctttacgaatccgagcacgctgaaaatcgggacggatatcactgcggcagacaaagcgatgacagcggtcgtcaccggagcggaagtcattctgccgcttgaagggctgattaacattgatgaggagatcgcccgtctgcaaaaagaattcgacaagctgacaaaagaagtcgaacgcgttcagaaaaaactcggcaacgaagggttcattaaaaaagctcctgagcatgtcattgaagaagaacgcggaaaagagaaagactacacggcaaaacgcgaagctgtccggcagcggattgcagagctgaaaggctgataaaacagcggggcggtttcctaagaaaccgccttgtcgtataaaagaggggatttcattgtttaatacgtacaaagaagcgatcagctggattcatggcagactcaagttcggcgttaagccgggccttctccgtatggaaaagctgatggaaaaactggaacacccggaaaagaacattcgcgccattcatgtggcgggcacaaacggcaaaggatcaaccgtcgcttttatccgttccgtgcttcaagaagccggttataaagtcggcacgttcacatcgccttacatcattacgtttaatgagcgtatcagcgtcaacggcacgccgatttctgatgaggaatggagaacgctcgttaatgacataaaaccgatagtcgatgagcttgataagaccgatgccggaacggtgacagaatttgaaatcattacagcgtgtgcatttttatattttgcgaagcgggctgatatcgattttgtcatttttgaagcggggctcggcggcacatttgattcaaccaatattgtgaatccgctcctgtcggtcattacaagtatcggacatgaccatatggcgattttaggcaataccatcgaggagatcgccgggcagaaagccggtatcattaaaaattccattccggttattacgggcgtcaatcagccggaagcactcggcgttattgaagcggaagccgataaaaagcaggctccgtatcagtcactatataaaacgtgcagactgtttaatgaagcggcgcttccttccggtgaaagcttttcgctggaaacggaaacgaaatgctatgaaaacattcaaacgtcgctgatcggcattcaccaaaggcagaatgcggcattggcgatattggccgctgaatggctgaatcgtctggaagccgcagccatttctgaagaagcgatgcgaaacggtctgaaaaaagcatcgtggccgggccggtttgaacgtcttcaaagccgccctttagtgtttgcggacggcgcgcataacgaagagggcgttgaaacgctgatagaaacgatccgccagcgctttgccgataaaaacgtccatgtcgtattcagcgcattaaaagacaaaccgtatcaggaaatgattaaaaagcttgaaaccgaagcggattccattcactttgtatcatttgactttccgcgtgcttcaagcgccgaagccctttataacgcaagcagtctagcggataagagtttcgatgagaacccggacagtgtgaaagagtggattgaacaaaaagatggtgcggatgatgtcatcatcattaccggctccttatattttatttcagaaatgagaaagcggcttatctgacagcccctcggatgcccgacggaccattttccggttttgccgggtgtttttatgctgaaaatatattttcagccatttcagtcatggtgtttttctttgctataatctgagccagattgatagtaaaggtgtggtctgagtgcttttgattctgttttttctcggcttgattttcggttcttttttttatacagcagcgtgccgtatcccgctgcgaatctcggttatttcgccgcgttcagcctgttcgttttgccgcttgccgctctcctggggggagcttgtgcccgtcgtttcctatattctgcaaagaggcagatgcagaaactgccgtgcaaagctgtcggttatgtatccggcggcggaatgctggacggcgtgtttattcacggctgcaggcattcatttcggtttctcaaaagaactgttagtcgcgctgttatttctgtctctgctcatgattgttactatgacggatctgcaatatatgctgattcctgacaaggttctgctgttttttcttccgcttttcatcgccggccgtatgttttctccgctggattcatggtatgcagggtttgcgggagccgtttgcggattttttctgcttgtttttatcatgtttgtcagtaaaggaggcatcggcgcaggtgatgtgaaactgtttggggtgatcggcctgacgctcggcgtgaagctcgtgctcattgcattctttctttccgttatgatcggagccgtatacggtatgtgcgccgcagcccggggcaggcttggtaaaaagcagccatttccgtttgcgccggccatctcagccgggagcgctttgagttatttatacggtgaagagctgttttcgttttacatcaagctagcttcaggaggggcttgaaaaatttggcgaacgttttttggacaagacgacaaaagtcttgttcttttttttttcgcctatgctaaagtgtgaaccatgatcagttcaaggtacggccaagacgaatgcaagggggaagagacgttgaaaaaaaggaagagcaaaaagcacagcaaagcaaaaaacaatgcccttaaagtaaccattaacggacaagaagaaacgatgtatggacaagaagatgtgaaagaaggcggggagaaaaccgtcacattttcaaattgggaggaaacaaaaaaggcggagcaggagaccgctgcatcccatgaagatccgaaagaagaagatttcaattgggatcatgagaagaattctgaggtatttgaagatgacccgaaagtcgttccgccataccagaagaaaaaaaacggccctcactttccgaaaaaaaagcagccgtcttctccagttaaaaaagcggtcacgacaattgccgttgcggctgttttaggcaccgggctcggccttgtcgccttaaatatgtcgggaagtaaagaagcctccgctccggcatcagctgacaaaggttcacaagggcagacggcgaaagcgggggatgtttctaaagacaaatctgaaacagccggcacaggagatgcggaatcttcagagggaaactataaaacatatgcggtgcaggccggaaaattttcatcagaaaaaggagcgcaaacgcttgttgaccagctgactgaaaaaggatactcggccgtctctctggctaaagaagatggatacacatacgtgatcgccgggcttgcagcggaaaaaagcctatcacagcaattgggtcagacactgatagaccatgattttgaggcttggggcggaaaagagctcagctttgcggtcgattcaggactggaagactcttttaaacaagcatctgagctctccgccaaagcgattaccggcaaagatctttcaaaaacggaagtggctgaagcggcaaaagcggcagacggtgcagacgccgctgacaaaaagcagaaagaggccgtgcttcaagcgctgaaagaactggaaacgtcgggttcagaatccggctggaaagcccaaaaagagcttttaagtgttgtaaaatagtatctcatttcccgtcatccggcgggattttttattttgtcatcaaaaagttatttttctgaaattgtggttgcccgtttgatttggtaggatagacaagtatctttttttcttaagcaaaccctgaaaggatgacaatcatgacaaaacgcttaatactcgcatcacaatctccgcgaagaaaagaactccttactcttcttcagattccttacagcattattgcaagccgcacagaagaaaaattaaatcgaaacctttcgccggaagaaaacgtccaatgtttggccgagcaaaaagctggtgctgtattggccgaaaatcccgatgcagtcgttatcggggctgacacgatggtgtgcatagacggcgagtgcctcggcaaaccgcatgacagagaagaagcggcacacatgctgcggaggctttccggccgaagccatcaagtcattacggcggtcagcattcagacgcatgaccggaaagaaacgttctgtgacacgacggaagtgacgttttggccgctcagtgaagacgacatacagctctacattgaaacaaaagaaccgatggataaagcaggtgcatacggcatccaaggaaaaggcgcgcttttagtgaaaaaaatagacggtgatttttattctgtcgtcgggcttcctgtcgctaaaacaatgagagccttgaaagaatttaatataaaagcttgatgttcaaaccgggaaggggaacaaggaggggttgatcatccgtgatctgccgttaaaattaagagatttccccgaaaaagaaaaaccgagagagcggcttctgcacttcggagccgaacatctctctaacaatgaattgctcgccatcctgctgcggacgggaacgaaacatgagtccgtcatgaacctcgctcaccggctgctgcggacgtttgacgggctgcgactgttaaaaggcgcctctgcccaggagctttccagcattccgggaatcggcacggtgaaagccgttcagattcttgccgcaattgagctggggagccgcattcataagacatccgccggggagcattgcgtcatccgctctccggaagacggggcgaagtatgtgatggaggatatgcgctttttatcccaggagcattttgtctgtttatatttaaataccaaaaatcaagtcattcataaacgcaccgtttttatcggaagtctgaattcatctattgtccacccgcgggaggtgtttaaagaagctttcaaacgatccgccgcgtccttcatttgtgttcacaatcatccttcaggagatcctacaccgagcagggaagatatagaggtaaccaggcggctttttgagtgcggaaatttaatcggcatcgagctgctggatcatttggtcattggtgacaaaaaatttgtgagtttaaaggaaaaaggatatttgtaacactttttttttcgttgatttaagatataatagattttatgagtttttccctttagggtatttttgctttaagaaaggaagatacatacatatgttcggaattggtacaagagaccttggtatagatttgggaaccgcgaatacgcttgtgtttgttaaaggaaaaggaatcgtagtgagagagccgtctgtcgttgctctgcaaacggatacgaagtccatcgttgcggtcggtaacgatgcgaaaaacatgatcggaagaactccgggcaacgtggtagcgctccgtccgatgaaagacggcgttatcgctgactatgaaacaactgcgacaatgatgaaatactacattaatcaggctgtgaaaaataaaggattgtttgcgagaaagccttacgttatggtgtgtgtgccgtcaggtattacggccgttgaagaacgggcggtcatcgacgcgacaagacaagcgggcgcacgtgacgcttatccgattgaagaaccgtttgcagcagcaatcggcgcgaatcttccggtatgggagccgacgggcagtatggtcgttgatatcggcggcggaacaactgaagtggcgatcatttctttaggcggcattgtcacgtctcagtcaatccgtgtagccggtgacgaaatggacgattcaatcatcagctatatcagaaaaacatataatctgatgatcggtgaccgtacggcggaagctattaaaatggagatcggttcagcagaaaccggtgaagaaaatgcgtcaatggaaatccgcggccgcgatcttctgacaggtctgccgaaaacgatcgaaatcacgggaacggaaattgcaaatgcactgcgtgatacagttctctcaatcgttgacgcggtgaagagcacgcttgaaaaaacaccgcctgagctggccgctgatattatggacagaggtattgtattaacagggggaggcgccctgctccgcaatctcgacaaagtcatcagcgacgaaacgaaaatgcctgttcttatcgctgaagatccgctggattgtgttgcgatcggcactggaaaagcactggagcacatccatcttttcaaaggaaaaacaagataatcaggagttaaatagaagaggtgtatcacgatgccgaacaaacggttaatgctattacttctgtgtattatcatattggtggctatgattggattctcgctgaagaacggccgtaataccacctggcctgaaaagctgatcggtgatacgacgggagtatttcaaaacatttttcacacgcctgccgaatattttgcagggttcttcggggacataaaagacctgaaaaacacgtacaaggaaaacgaacgcttaagacaaaagctggacggacagacacaatatgaagcgaagctccaagaactcaaagatgaaaacaagaagctgcgtgatgaactcgggcatgtcaaatcaatttccgactatgatccgattttagcgaccgttatcgccagaaaccctgatcaatggtacaagcagatcatgatcaataagggaacgaagcagaaagtggccaaagacatggctgtcacgaacgaaaagggtgcgctggtaggaaagatcaaaagcagcggactcaacagtttcacatccgccgttcagctgctgagcgatgttgaccgcaataacagagtggccaccaaaatctccggcaaaaagggcagcaaaggctacggtttaattgaagggtatgataaaaagaaacagactctgaaaatgaccatccttgagccggatgaaaaacgtgaagtgaaaaaaggcgacctcgtggagacatccggaacgggcggcgtatttcctcaaggactgacggtcggggaagtgaccgatgtagaatcagatgcttacggcctgacgaaaatcgcttacgtgaaaccggctgccgacctgtacgatcttgaccatgtcatcgtcgtgaaccgaagcgtagcaacaggggaggaaggatcgtgaaacgtttccttctccctttgattatgattttggtcttttgtgcggaaagcatctataccgatctggtgcgttttcctttcgtttccgtcgagcagcaggtcgttccgcattttcttttgcttgcgctgatttttatgtccgcttatatcaaccaaaagcatgcggtgatctacggtttgattttcggatttctttatgacatcaattatacgggtgttttaggcgtttatatgtttggttttgccggtttatgctatctggcggccaaagcgtttaaagtgctgcagacaaacgccctgatggtcattctggttgcggtgctgagcgtatgtgtgcttgaattttacgtctacggcattcagacgttaatccgcagcggcacaatgacatttaacgattttgtcattcagaggttcttgccgaccgctttgctgaatattgcgggagccgttatattagtcctgcccttcaggctgttttatataagtctgaagaaagaattaagagatgagtaaaaaggattttatctttttttgacgaaaagagtatgttgttgaggtgaacattgatgaagaccaaaaagcagcaatatgtaacaataaaaggaacaaaaaacggcttaacattgcatctggatgatgcgtgttcttttgatgagcttctcgatggtcttcaaaacatgctgtcgattgaacaatatactgatggcaaaggccaaaaaatcagtgttcatattaaactcgggcatcggtatctgtatcaggaacaggcagagcagctgactgatctgatcgcgtcaaagaaagatttagtcgtgcattcaattgacagtgaagtcatcgccaaagaagaagcgcagcggatgaaagaggagcaggaaattgtttctgtttccaaaatcgtccgttcgggccaggtgcttcacgtgacgggagatttgcttttaatcggagatgtgaatcccggcggtacgatcagagccggaggaaatatatttgttctcggttcattaaaagggattgcccacgcgggttataacggaaataaccgggctgtgatcgccgcatcagaaatgatgccgacacaattgaggatcaatcacgtgttaaatcgctccccagaccacattcaaaaagggaacgacatggaatgtgcttatttagatactgacggaaatatggtcattgaacgccttcagcaattggctcatttaagacctgatctaacaaggcttgagggaggaatgtgaaattgggtgaggctatcgtaataacttcgggaaaaggcggagtaggtaaaacaacaacatctgcaaacctcggtaccgccttagccattttagggaagcgcgtctgtttggtagacacagatatcggactgcgcaaccttgatgtcgtaatgggtcttgaaaacagaattatttacgacttagtagatgtaattgaaggcagatgcaagacgcatcaggcgcttgtcaaagacaaacgttttgatgatctgctgcatttaatgccggctgcccagacaagcgacaagacggctgttgtccctgagcagatcaaatcgcttgtgcaggagcttaagcaggaatttgattatgtgattattgattgtccggccggaattgaacaaggctataaaaatgccgtctccggagctgataaggcgattgttgtgacgacgccggaaatatcagcggtgagggacgctgaccgcattatcggacttttggagcaggaagatatcgaaccgccgcgccttattgtgaaccgcatcagaaatcacctgatgaaaaacggtgacacgatggatgtggatgaagttgttcatcatctgtctattgatctcctcggaatcgttgctgacgatgatgaagtgatcagggcttcaaatatcggcgaaccgattgccatgaattccaaaaaccgcgccagcattgcgtaccgcaatatcgcccggcgcattttaggagaatccgttcctttgcaggtgcttgaagagcagcaaaaagggatgatggcgaaaatcaagtcatttttcggcgtgcgttcataatatataccagaatacaaagatctgatgaagcccagcttatcaggtcttttttgtttttcaagagcgcatatttgcaatggacaagacataggatgtacaaacccaacgattgcaaaggatgatggcgatgagtcacagagctgatgaaattagaaaaagactggccaaaagaagaaaacagcggcctgaatcaaaacggactttcgttcaaaacgcccaaacgcagaattttcccgcgtggcagacggtcaaggagcaggaaaagcacaagcttctaccggactacgaatatcaaacggaacacccgcccgaatttaacggacggcatccattgatcagcgctcattctattattttaaaatgcctgctggccgcctgtctcgtactgatctccgctattgcctataaaactgacaaacagccgctgagtcagatcaaaccggcgatcgcacaaacctttcaaaaagaatttcagtttgctgccgtaagcaattggttcgtatcttccttcggaaacccgctcgcttttcttacgccgggaacgaaaaagaaggacggtcaggtggcggtcagtcaggatatggccgttcctgccgcggggaaaatccagcaggactttcaaaataacggagaaggcgtcgtcgtcgaaaccgccagcgaagccattgacagcgtaaaagaaggctacattatggaagtgagcaaagataaaaaaacagggctgacggtgaaggtgcagcacgccgacaataccagcagcatttacggccggctaaaagatgttaacgtttcattgtacgactttgtcgataaagggaaaaagatcggttcgatcaagctcaacgataaaagtaaaggccagtactatttcgcgatccaggatggcgataaattcatagatccgatccaggtgatcacatttgatgaataaatggctcatcctcctttttaaaattcatgtccatccttttctttggattatcatggggcttggtcttatgacggggcacatcaaagcgctgctgtgtcttttgctggtcgtatccgttcatgagctggggcatgctgctctggctgtgtttttttcgtggcgcattaaacgaatctttctgctccctttcggcgggacggttgaggtggaggagcacggaaaccggccgcttaaagaggaatttgcggtcatcctggcgggcccgcttcagcatgtgtggcttcaggcggcagcctggctctttttcatgtcaggctttgcaagtgagcagacatttgagatgtttaccttttataatctctccattcttttcatcaatcttttgccgatctggccgcttgacggcggaaagttcgtgtttttatacttctctaaacaaatggcttttcaaaaagcgcatctcctcagcctgcagacatcggccgtttccgcgcttttgctctgctgctggattgtgctggccgtcccccttcaggtcagcgcatgggttctgttcgtctttctcgccgtctctttatgggatgaataccggaagcggcattatattcagctgaggtttcttttggagagatactacggcaaaaaccgcgatgtcgccatgctgcatcctttgacggtcgcggccgatgccaaagtaaagcatgtcatggccgaattcaaacggggatgcaagcaccccattatcgttgaaaaagccggcgaaaagctcagccagctcgatgaaaatgaagtgcttcatgcgtattttgccgataaacggacagattcctctatggaagacctgctgctgccttactagaaatagattgacatatccttttggttctgatatattttttaatgttatggatgtagcaccaatgctacaaccgctcgggacaggtgataagagctttaaagccccctgttgctggcgagtcttagtctaataggaggtgcagagaatgtacgcaatcattaaaacaggcggaaaacaaatcaaagttgaagaaggtcaaactgtttacatcgaaaaacttgctgctgaagcaggtgaaacagtgacgtttgaagacgtattgtttgttggcggagacagcgtgaaagtcggcaacccaacagttgcaggcgcgacagttacagctaaagttgaaaaacaaggccgtgcgaaaaaaatcactgttttccgttacaagccaaagaaaaatgttcataaaaaacaaggtcatcgtcagccttatactaaattgacaatcgaaaaaatcaacgcgtaagcatgattgaggcaacaattcgaagatcccggaatgacgggggcatattgtcctttgaaatgacgggacatgccgattttgctgaacatggacgagatctcgtatgcgccggggtcacggctgtcgttttcggagcggtcaatgcggttatcgcgctggctcctctcgaaccgattcttgatataggcgaggacgggggttatttctactttgaattccctgaagccgctgatcaggaagctttgcaaaaagcgcagctgctgattgaaggcatgattgtttctcttgaaacgatcgagcgggattacagtgaacacttacggttgactgcaaaccaaatataggaggtgagttacatgcttagattagatcttcagtttttcgcttctaaaaaaggtgtaggttctacaaagaacggacgtgactctgaatctaaacgtttaggcgctaaacgtgcagacggtcaattcgtaacaggcggatctatcctttaccgtcaacgcggaacgaaaatctacccaggtgaaaacgtgggccgcggaggagatgacactctttttgctaaaatcgacggaactgttaaattcgaacgtttcggccgtgaccgcaaaaaagtgagcgtatatcctgtagctcaataatgacacaaaaaactccggtcgttgactggagttttttttgcagtaagcggagtaacatcaagaatgaaaagcagaggatgcgtgagtgaaccccgccttgaatgaggacatcagcttcccatacccactggatatgttccccaagcagtgataccaaaaatgtttctgcctggcatccgcattgtatgcgatccgaaaaaggaacatgatgaaccaggaaaaacaagtgtttttttaacaaagccttctctgttataattcatagtacacacttatcaagactcctaaaaagaaattaaacgattgggagtgcgaaaatgaaggatgtatcgaagaaacaagaagaacctgtaagcgatgcggctctgatcaatgagctgatccaattaatgggccatttccgtcatgattggatgaataagctgcagctgataaaaggaaacttaagtttgcagaagtatgacagggtcgttgaaattattgacgaaatggtcatagatgcaaagcacgaatcaaagctctcaaacctgaaaaccccgcacttggcgtttgactttcttacatttaattggaagtcccgttatatgaggctcgaatacgaagtgctcggagaaattaaagatttatcggcatatgatcaaaagctgtcgaacctgatgagaaaactgtttcatctgttcggtctggcggtaaacaatgaaagtgaaaatcatctgaccgtatcgctgcagacggatcaccctgacagacagcttattgtatatctcgattttcatggaacgattgcaaatgcagatgtgtttgatgaatttcgcaaatcccggcatgaggactttgatgtcatgcaatttgagctgaccggccatgaatgtgtggccgaaattggaatgaactagcggttttttacggtttagaacggaggatattatgtttgtagatcaggtgaaagtatatgtaaaaggcggcgacggcggtaacggaatggttgcgttccgccgtgaaaaatatgtgccgaaaggcgggcctgccggcggtgacggaggtaatggaggcgacgtcgtttttgaggttgatgaaggactgcgtacgctcatggacttccggtaccagcggcatttcaaagcgatacgcggcgagcacggcatgtctaaaaaccagcacggcagaaatgcggacgatatggttgttaaagttccgcccggcacagtcgtaacggatgacgatacaaaacaggtcattgccgatctgactgagcatgggcagcgtgccgtcatcgcaaaaggcggacgcggcggacgcggaaatacccgctttgcgacaccggccaacccggcaccgcagctgtcagagcacggagagcccggaaaagagcgctatatcgtgcttgaactgaaagtgcttgcagacgtaggtctcgtcggcttcccgagcgtcggaaaatctacgcttctgtctgtcgtttcatcggcaaagccgaaaatcgccgattatcattttacaacgcttgttccgaatctgggcatggtggaaacggatgacggaagaagcttcgtcatggcggatctgcccggtttgattgaaggagcgcatgaaggagtcggcttaggccaccaatttctccgccatatcgaacggacgcgcgtcatcgttcacgtcattgacatgtcagcgatggaaggccgtgatccgtatgaggattatgtcaccattaatcaggagctcagtgaatataatctgcggctgacggagcgtccgcaaattatcgttgcgaataaaatggacatgcccgaagcggctgaaaatcttaaagcgtttaaagaaaagcttcaggatgatcaccctgtctttccgatcagcgcggtgacgagagaagggctccgcgatcttctgtttgaagtcgccaaccagctggaaacaacgcctgaattcccgctgtatgatgaagaagaactggcggaaaaccgcgtaatgtacacgatggaagatgaagaaattccatttaacattacgcgtgatccggacggcgcgtttgtgctttcaggtgacagcctggaacgcctctttaaaatgactgatttctcccgtgacgaatccgtcaagcgttttgcaagacagatgcgcggtatgggcgttgatgaagcgctcagagaacgcggtgctaaagacggcgatatcatccggcttctggaatttgaatttgaatttattgattaaaaaaacggagagcttgcaatgcaggctctctgatgtaaaagggaggggtgcaggtgaaagaagagacattttatttagtgcgtgaagacgttctgcctgatgcgatgcggaaaacccttgaagtcaaaaagctgctcgacagaaaaaaggctgaatcggttgcagatgctgtgcagaaagttgatttaagcagaagcgctttttacaaataccgagatgcggttttccctttttacacgatggttaaggaacaaataatcacacttttctttcatttggaggatcggtcaggcgcgttatcccagcttttgcaggcggtggctgactcaggaagcaacgtgctttccattcaccagacgattccgcttcagggcagggcgaatgtcacgctctcaatcagtacgtccgcaatggaagaaaacattcatacgttaatgaataaactgagaaaatttgattttatagaaaaagttgagatcttagggtcaggcgcgtaaggagagaagagacatgaaagtcggttatttagggccagaagccacatttacacatctagcagtcagttcctgctttcaaaacagtgtgacacaagcaccttatcaaacaataccggcatgcatggatgcggcggttgcgggagaagttgatcttgcatttgttcctttggaaaacgcgctggagggctcggttaacttaacgattgactatttgattcatgagcagcctcttgcgatcgtgggggaaatgacgctgccgattcaccagcatctgctcgttcacccttcgagagaaaatgagtggaaaaagcttgagaaaatttattctcattcccatgcgattgcgcaatgccacaaatttcttcaccggcatttttcgtccgttccttatgagtatgcgaagtcaacaggtgcggctgccaagtatgtcagtgagcattcggaccttccgatcggcgtgattgcaaatgaaatggccgccgctacatacggattgagcatcgtgaagcgggatattcaggattatcaggacaaccacacgagatttgtcattctttcgcctgaaaaagacgtctcattcgaagtgaatgcgaaactgtcttcacggccgaaaacgacgatgatggtaacgcttccccaagatgaccaatcaggtgcgctgcacagggtgctgtccgctttttcatggagaaacctgaatttatcaaagatcgaatcgcgcccgacaaaaacgggtctcggcaactatttctttattattgatattgaacaggcgatggatcaggttctcattcccggtgccgttcaagagatggaagccctcggctgccgggtcaagcttctgggaacatatcaatcctattcgatataaaaaaagcccttcagggggctttttttttaatcttttattaaaatacccgcgtcgtccagcgcttggcaggcttggtcaatccgctcttttgtcggggcgcttaacgtatggaggtgcacgcctccggtcagctgtgaaaggtaagcggcatttgtcgagttaatgtgatccatgaattgtttgacttctttccgtgtactgactcttatggcggcggttaaatcgccgtatacggggtgttcaattatgacgtcctttatggtgacgccttcatcgacaatgagtgcaagctcttcttccgtccgctccgggccgtgcagacaggcgacaatccgttcggcatttttttcgccgccggcattcatgctgatgtataagtagccttggctcgtcgcgataatcggctcgttttttgctttcaaaagcgatatgtcctgcacgatcacctgtcttgagacatttgcttttttggccaattcgcctcctgttaatggcgagccggcttctttcagccaatgaagcagcatgtcgcgtcttttctccccagtaagcttcgttccttctgtcaaattgctgattctcctttcttttgctcccatagcgccgtaaatgtatgtatcagcatatcgagctgttcacatgttgtttcgtttccgaatgagatccggaaaaactgccgcgcttcccgttcggtttttcccagcgccttcatagctgaagaagggccgtggctgccggcggaacatgcgctcccggttgagatgcaaatatcgttacgattacattctaacataatatattgtccttcaaaggagtgaaaaaaacacccgacaatgtggggcaggcattcaccgccggtttcttcctctgaaaatgaaatggggaggccttgacgccgaatttggtcatacaaataattcctcagcctgtcagcatgctcacggtgttcctccatatgtttcactgcatactcggcagcagcggtaaaagcgccgatggccggcacattcaccgtaccgggcctgaacccgttttcatgcacggtatgcggataaaccgggttccagctgacaccgggccgaatgtaaacagccccggtgcctttcgggccgtatactttatgaccggagacggaaagggcgtcgattccctcctgatccgcatcaatcggcagtttgccgaaactttgaacacaatcgcaatgcagcaaaatgtttctctggtgaagaaaagcggccagacgattcacaggctggatgaggccggtttctgaattggcgtgctgtatggaaacaagccccgtgtcaggacggatatgagccgccagtatgtcctcggttataaggccgttttcgtcgggatatatgatggtgacattaattccacggtcagctaaaaacgccgcggcattatggatcgaatggtgttccattgcggtcgtaataaaatgttttttgtgatcgggcaggccgtgcagcaatgattggacggccaggatgttcgcttccgttccgccgcttgtaaagtaaatgccgtctgccgctccgccgatcaatttgcctgcagaatgtctgcaatattccagcacgtccgccgctcttcctccggcgtcatgaaggctgcttgcattgccgtatacctctgtgctgagatgctgaaagactttcgcggcttctttgcttaaaggcgctcccgccgcgtaatcaagataaatcatacagcccgtctcctatccgtttatgttaaaaaaaagcttgagtttattttatcgttgtgtaaatataggtgtcaagacaggtgtaaacataacaggagggtgatgtatgtctgaaaaaacaattatcgtcattggttcggggacggcggcccttgcctgtgcttcctcatttcctccgtcataccaagtgaccgtcatcacaaagagaaacgtaacgaacagcaattcgcattatgctcaaggcgggattgctgtttcatatgcaaaagatgactctatagaatcccatgtgaacgatacactgtatgcgggatgcggacacaatgacgtgacagccgtgcggcatttgctgaaaagcggacaaagcatgataaacaggctgatagaaggccacttcccttttgatacgaagtcggacgggacgttttgtctcggcagggaaggcgctcattccaaaaggaggattctgcacgccgggggagatgcgaccggacggatgttagttgagtttctggttcagcagctgagggacggcatacggatcattgaacacgagacggttgttgatctgctgattgaacacggacgatgcgcaggcgttgccgtcaaggatgcttcaggcgccgtttcttacagaagagcggatagtgtagtgcttgcatcaggcggctgcggcagtctgtaccaatatcacacaaatgattccgccataacgggagacggcatcgctcttgccttccgcgcgggagctgagatcacggatatggagttcacccagttccacccgaccctccttgtgaaaaacgggactgtgtacggcctgatttctgaagcagtgagaggagaaggcggatatttagcggatcgcttcgggcgcaggatcatggctggcagacacgcgcttgaagatttggcgccccgggatgtggtttcacgggcgatttatgaagaaatgatgaaagaaaatcctgtttttataaattgcagccgaatagccgattttaagaaacgttttccgaccataacagaaatttgtcaaacagccggtgttgatcttgaaagcgggattcctgtagcacccggaatgcattttttaatgggcggagtaaaagccgatacatgggggaaaacgtccgtgcctgatttgtacgccataggcgagaccgcctgcacaggattgcacggggcgaaccgccttgcgagcaactcactgctggaagcgctggcaagcgggaaacgatgtgctgaacatatcattcaaacgccgttaaacggaagatataaaaaaaccccgaagaaatctgacgtcatcttagaagtgccggacacagcgcttcatgtgctccaagccaaaatgacaaccggagcgggcattgtcagggaaaaagaaaacatgcaggcgctggcatcctggcttaacaacgtatctgtgcgtcatataaatgtgaagggaatcacaatagaacaagccgagctatcctgcctatggaagactgcgcaacttgttgtgacctcagcccttattcgggaagaaagcaggggggctcattttcgcgctgattttcccgggacggagaaagagtggcacggaaaacaaatcattcattcaacatctggaacagctatcagaaaaaacgaaaggattggggaactatggacattctgcagctgaaacaaatgctgactcatttttttcaggaagatatcggaacgggtgatgcgacgtcacaagcgattttttctgatcagcaatgtaaagcgcgaatcatcgcaaaaacagacggcgtgtttgccggagaagccgttatccgtgaaggatggaagcttttacacgatgatatccgcatccgctccctgaaaaaagacggagaacggatgaaaaaaggagacgtgctcgctgaaatggaaggccaggcggcggctcttcttacgggggagcgggtcattctgaatctcatacaaagaatgtcaggcattgcgacaatgacggatgaggccaaaaggcgtcttgatgatccgactatcaagctttgtgatacgagaaaaacgacacccgggctcagaatgctggaaaaatacgccgttcgggtcggaggcggctttaatcatcgcttcggcttatatgacggcatcatgattaaagataatcatattgccgcctgcggatcgataaaggcggccatggagcgggcaagaaaaacggcggggcagatgcttgcggtggaagtcgaaatcgaatccgaacagcagctgctcgaggcaatagaagcgggtgcagacgttattatgtttgacaactgtccgcctgagtccgtccggcgttttgcaggtatgacaccgggccatatcaaaacggaagcatccggaggcataacgctcgacacattgcccgcttataaaggaacgggggtccaatatatttcactcggatttctgactcattcagtaaaaagcgccgacatcagcatggatgttgaggcagcggaacagggggatttttaagatgtctatttttgacgtgctaactgcatcagccgaaatgatgccgagccattataaagacatgagcactggagaaatggaaaagcgggtcgccgccattaaacgggctttcggaaagcgcctgttcattccggggcatcactatcaaaaagacgaagtaatacaattcgccgatacggcaggtgactccctgcagcttgctcaagtggcagaaaaaaataaagaggcggaatatattgtgttttgcggcgtgcattttatggcggaaaccgctgatatgctgactgatgataaccaaaccgtcattttgcccgacatgcgcgccggatgctcgatggctgatatggcagatattcagcagacggacaaagcatggcaagagcttcaagaactgtacggtaacaccatcattccgttaacatatgttaactcgacggcggaaattaaagcattcgtcggacggcacggaggagcgaccgtcacctcttcgaatgcccggagtgtgctgaaatgggcttttaaacaaaaagagagaattttatttttgccggatcagcatttaggcagaaatacggcctatgacctcggcattccgctgacagaaatggctgtatgggacccggtgcagaaccgattgcttactgaccatccggaaaacattaaggttatcctttggaaagggcattgctccgtacacgaaaagtttacagcggaaaatatttctcagctgcggcagcgggattccggcatccgcattatcgttcatccggaatgttcgcgggaagtggtctcgctcagtgacgacagcgggtctaccaaatacattattgatacgatcgaacaggctgaaccgggaagcaagtgggcgatcggcacggaaatgaatcttgtccagcgcctcattcactcgcatccggataaacagattgaatcattgaatcccgatatgtgtccgtgtctgacaatgaacagaatcgacctgccgcatttattgtggtcgcttgagcagcttgaaaaaggcgagccgaagggtgtcattaaagttccggaagcggttcggacagaagcgcttcgtgctttgaacagaatgctgagtcatacgtaatcataaaaatttcccctccttcccaaattttttatcatcatgcccagtccatcggcatatagtgtgaagaaacgtattgtaatgacaaatgtaccgttcacgttttgtgcataggaggggaaaacgttgaaaattcatatcgttcaaaaaggcgattcgctctggaaaatagctgaaaaatacggagttgatcttgaagagttaaaaaaactgaatcatcagcttagcaatccagacttaattatgcctggaatgaagataaaggtgccttcagaagccgttccggtcagaaaagaacctaaggccggcttcggaacgtctgcgcataagcatgagcatccatatgccaaagaaaaaccgaaatcagttgtggacattgaagacaccataccggaagaaccaaagccgtcaattccgtatgtgccgccaatccctgaaaagcatgaaaatgtgctgccggaagctgatatgaaccaatattacccgtccaatcagctgtttcagccgtggtcgcctcctaagccggaggaaccggtgacacattttgtcgagccgaaagaaaaagagcatgacaataacattccacaacaggaggaaatgatcaacatggaaaacgcgaattacccgaatatgccaaaggcgcctgaagccggaaagatggaagaagaaaacgccgcttatcatctgccgaacatgccaaacattccgaatgtcccgtttccgaatatgccggccgttgaaccgtcttttatgcattatccgatgccgtgcatgccttgtccttgtccggttccggtgacaccgatgctgccgggttcgggactatgccatccgtgcttcccggtaggcggaggtttcggcggttttggaggaggttttggaggctttccggtcatgccgatgccgttaccgtacggattccatcatccgggatttgggccgcatgcgggttacggtgaatatgaaaaccaggcccatgaaaatgcagagcattatgatggttctgcatctggtttcggcggtgctccgtacggtcaaatgccgtattacggcggatattcgtcacattacgcaaacgcgcctcatcatgatggaaaatataaggatgatgattgcggctgccatgattcacatcatcaccaccaccatcaccacggttcacatcaccatcacgcaaatatgcctgtgcagccgtatccgaatatgggtgcaaacgccggatattttatgccttacggcggagcaaatcctaatgccgcgccgaatcagccgagtccaaatcaagtattcggacggccggaggaagaagaagattaatgtttcgggacgatgtatgtcgttcctttttttatgtccaactgaggaatggacataactgacaagcttaaacccgccgcccgccgcgcatcctaaacatgagcggaaaacgctcaaaacagcgatgaatccacggggggtttttccattgggtaaaaaactgatgacgatcgcgggcgttttagccgtgacggcaagcttaacggcatgcggagcaaataatgccatgaatgacggacgctacaaccagtcaacacgtccggtcggatattattcgaatgataatggtaacggcagaggccagtacggaatggaccatcaaggacccgtttctgaaatgatggaaaaccgaaacggccgtcataatacgacaaacgtgtccgaccagtacgcgcctaatgacggggctccgttaacgacggacggcacatataacggccgaaatgtcaatacgccgccggcagcaatgtcttataatgggtatgacaacgccgaaaacatcaggttggcggcaaaagttgcaaaccgcgtgaaaaaagtaaaaggcgtacaggatagtcaggtcatcgtgactgacacgagagtcgtcattgccgtcagaacaaatcatccttttacgaagaatgatgataaacatgtcaaacatgcggccaaaaaattcgcggacggccgtacaattcaagtgtttaccgacaacgctacttttacaaagctgcaagacatgaacagaaacagccgttaaacgggactgccggatgatttcatccggcagtatttttatgaataaagcttcatcatttctttacatattcttaaaacgctctttatattgcggtgttaacataaaagtaataaaacgtaacggaggggccggaatgaaaaaaacggagcatgacaaaagccgcggagcaaaaactgtgtatctgaccgtaaggggataccggctcaaactgacgcccggacaaatgaaactgatttcagccggccgggcataatcatcgcagcagccctcatttagagagctgctttttttcggctgaaacagacaaatgaaagaaaacgattaagcaccggcatctttggtcaaactagcatcaagagtttgattgaataaagaggtgttattggtgaaacgaatttgcggtgctcgtctattgtttatgcttgtcttatcggctgcagtcctgatttgcggaggaaaaggcgcatatggggcggaggttgagctttacgggccgcttcgggtgcacgtccagctggaaaaggtctatcttgacggtgatgtcggcatcgaacatacggatgaaaccgttttagcgatggaggatttttgggcctcatatgccggctggacgctcgttgagcagaaaaaaggcttcgtccttttccgtaagcatgttgatgacatttctccgctcagtaaggttaacggttatatcggcgtcacggacggaggcgtcatctccacttttcacggccgtcccggatcgctggccgagccgattcaatctttcttccagattgatatagaaagactggaaagccgattgcaaaagcacttggaacacggcataccgtacaggacaaaagcggagtttgagagcgtgatcgatcatattaagacttacagcggctgactttgacgcaagacatgtgacacatgtcttttttttctgaatggaaggtgtcaaagcgaacatacgttaacttttctataagactttggctgtttttgtgttacaatgataagcagtcaaagaggtgaataggtgtgattgaattcgtgaaggggacgattgattatgtatctccccaatacatcgtgattgaaaacggcggaatcggctatcaggtcttcactccgaatccgtttatttataaggtaagcaatcaagagaccatttttacgtatcatcatataaaagaagatgccttttctttgtacggtttttcaacccgggaagaaaaagcgcttttcacaaagctgctgaacgtcaccggcatcgggccgaaaggggcgctcgccatcctcggttccggtgatcccggagccgtcatcgaagcgatcgaacaggaagatgaagcctttttggtgaaatttccgggtgtgggcaaaaaaacggcgcggcagattattcttgatttgaaaggcaaactggccgacgtcgtgcctgaaatgattgacaacctgttcaatcatgaagcgcgcattgaaaaacaagaggctgaaacggcgcttgacgaggcgcttgaagcgctccgggttctcggctacgccgaaaaagaaattaaaaaagtgcttcctcacttaaaagaggaaacggcgctttcaacagatcaatatgtgaaaaaagcattgcaaaaattattaaagtaaggtgatgttcatggatgaacggctcgtttcaagtgaagcagacagccatgaatcaataatcgagcaaagcctcaggccgcagaatctcgcccagtatatcggccaaaagaaggtgaaagaaaatctgcgcgtgtttatcgatgcggcgaaaatgaggcaggaaacgctggaccacgttcttttatacgggcctccgggtctcgggaaaacaacgcttgcgtctatcgtggccaatgagatgggtgtggagatgcggacgacgtcaggtcccgccatcgaaagaccgggggatttggcagccattttgacggcgctcgaaccaggggatgtgctgtttatagacgaaattcacaggctgaaccgctcaattgaggaagtgctgtacccggcgatggaggatttctgccttgatatcgtcattggaaaaggcccgtccgcccgctccgtccgtctcgaccttcccccttttacgcttgtaggagcgacgacaagggtcggattattgaccgcaccgctcagagaccggttcggggtgctgtcgcgccttgaatactatacgcaggaagagctgacagatatcgtgtcaagaacggctgacgtttttgaagtggatatcgaaaaagcaccggctctggaaatcgccagacggtcaaggggaacgccgcgggttgcaaaccgtctgctcagaagggtgagagattttgcccaggtgctcggcgacagccgcatcacggaagaaatcgctcacgacgcgctcgaacgtcttcaagtcgatgcgctcggccttgaccatatcgaccataagctgctgatgggcatgatcgaaaaattcagcggcggtcccgtcggtcttgatacgatttccgcgacaatcggcgaagaaccgcatacaatagaggatgtgtacgaaccgtatctgctgcagatcggatttcttcagaggacgccgaggggacgggtcgtgactccggctgtgtatgaacattttcgattggaggcgcccgcccgtgactgactttccgaaggttctcatggttctcggtgccgttttgcttattgccggcgcagtctggcactttgtcggaaggctgcccggagatatttttgttaagaagggaaatgttacatttttctttcccgttgtcacttgtattgtgatcagtgtgatactatccattctgcttaattttttcggcagaataaaataacaatagacagaattaaggtgaaatgatgaaagtcgatttatttgattttgaactgcctgaacgcctcattgcccaagtgccgcttaaagagcgtgacgcatcgcggctgatggtgctcgacaaacagacgggcgggctgacggacagttcatttaaagagattgtaagcttttttaatgaaggggattgcctcgtcttgaacaatacccgtgtgctgcctgcaagattattcggcacaaaagaagatacgggagcgaaagtggagcttctgttattaaaacaggaagaaaatgatacatgggaaacgctcgtaaagccggcgaaacgcgtaaaaaaaggaacggtcctgacatttggcgacggccggctgacagcggtctgcacggaggagcttgatcacggaggcagaaaaatagaattccggtatgacgggattttttacgaagtgcttgaatcactcggtgaaatgccgctgcctccttatattaaagagcagcttgatgataaagaacggtatcagaccgtcttttcaaaagaaatcggatctgccgcagctccgacggccggacttcattttacggaagagattctggacgagctgaagcaaaaaggtgtgcggattgaatttatcacacttcatgtgggactcggcacattccgcccggtcagtgcggatgatgtggaagagcataacatgcacgcggaattttatgaaatgacggaagaaaccgccgcctctttaaacgaggtcagaaaggcgggagggcgtatcgtgtcggtcgggacgacatcaacgcgcaccctggaaaccattgccggcgagcatgccggcgaatttaccgcttcaagcggctggacgtccatcttcatttatccgggatatgaatttaaggcgattgacggcatgatcaccaattttcatctgccgaaatcttcccttattatgctcgtttctgcgcttgccggcagagagcatgttctttccgcctaccgtcatgcggtagaagaggaatatcgtttcttcagctttggcgacgccatgctgattatctaatttgaatgacaggaggcctcatacaaagtggctgaacaaccgatacgttatgaatttataaaggaatgcaaacaaacgggagcgcgcctgggcagagtccatacgccccacggctcctttgagacgcctgtatttatgccggtcggcacgcttgctacggtaaagacgatgtctccggacgagctgaaatctatggatgcgggcattattttaagcaatacgtaccatttatggctccgcccgggacatgacattgtaaaagaagcgggcgggcttcataagtttatgaactgggaccgcgcgattttaacggattccggcggttttcaggtcttttcattgagcaagtttcgtaatatagaagaagaaggtgttcatttccgcaatcacttaaacggagacaagctgtttttatctccggaaaaagcgatggaaattcaaaacgccctcggctctgatatcatgatggcgtttgatgagtgtccgccgtatccggcagagtatgattacatgaaacgctctgtggaacggaccagccgctgggcggaacgctgcctggaggcgcacgggcgctcagatgagcaggggctgttcggaatcgtacagggcggagaatacgaagacctgcggacacaaagtgcaaaagacttggtttcgcttgattttccggggtatgccataggcgggttatctgtcggcgagccgaagcacgtcatgaaccgagtgcttgagtttacaactccgcttttaccgaaggacaagccgagatatttaatgggtgtgggttcaccggatgccttaattgacggcgccatccgcggcgtggatatgtttgactgcgtactgcccacccggattgcccgaaacggcacggtgtttacgaatgaagggcgtctgaatatgaaaaacgccaaatatgagcgtgatttccgtccgattgatgaagagtgcagctgccatacatgcaaaaattactcccgcgcttacatcagacatttgatccgctgtaatgaaacgtttggaattcgattaacaacttaccataaccttcattttctgttacacttaatggagcaggtcagacaagccatccgggaggatcgtcttggtgatttccgagaagagttctttgagcgttacggctataataagccaaatgcgaaaagcttctaaataaaaccattcttgaagggagggaaacagatgggtactttaggtacaatcgttcctattattttaatgtttgcagtgctttatttcctgctcatccgtccgcagcaaaagcagcagaaggccgtacgccagatgcaggaagagctgaaaaaaggggattcagtggtgacaatcggaggattgcacggcactgttgagtcaattgatgaaagcaaggtcgtcattaaaacaggtgataacacccgtttaacatttgaccgccgcgcaatcagagaagcttccgctgaataacagcgaagctcatacatacaaaaaaagagcggagaatccgctctttttttattacgctgatctgcttcctttcaaattcactccgaaaatgccgcccagcatactgactcccaaaaagccgagatgaaacaaaagctgaccggatgtaaacgtttttccgaaccctaaatattgaaacagcaagataattaatgaaaaacagacggcggttaacgctccgatcatccagcctttttccttcgctttgccgcccgatataaaaccgcccgcaaataaagaaagaaaagaaagcgcggtgatcagccagctgaaagatgattcttccattgaggtaaccgtcagtaaaagcgaaatcgccaaactcgtaagaagcatcaccgcaaagatagccactaagccgtacaagacgcctcttcccacttgtttcgtttcttccatttttatctcctctccgctctgcggcctgatatatgacaagccggagcccgtctttttctaaatgtattctctgaatgttcgaattagacgtaaatgcatgatgttcagcccgtttcttacataattcagagccgatggcaaatgctatgaccgttggaggtgcgatatggaagatattttcattattacgtttcgtacgattgtgctttattttatcattcttgtgattttcagactgatgggaaaacgggaaatcggagaactgagcattttagaccttgtcgtctccattatgattgccgagattgccgtattggcaattgaaaatgtaaaagataagcttttgcatacgattgtgccgattgtcgttttaatgattattcaagtaagccttgcttttatttcgctcaaaagccaaaaaatacggcagctgcttgacggaaaacccaccattattataaaacagggaaaaattgatgaacgggcgatgagatcgcagcgctacaattttgacgatcttcttatgcagctgagggagaataacatcgatagaatctctgacgtgtcatatgccattttggagtcttcaggcaaactgtcgatcgtcaaaaagaaaaacaataaggataagcagatggaaacatcgcttatcgttgacggggtcattcagaacgagcatctggacagaatcgggaaagataaacactggctcgaaaaaaatttagcaaaaagaggatatcgcgatctttcggttatatcattctgcacgtttacggacggcgctttttttattgatcttaaagatgaaaaaggggagccgtgaatcggtttcaccgcgtcacgaacttgccgatgaccggaatccggatcagctcttcccttttaatcagcctgaataacagaagaagcgctatatacaaaatcgcggtcattgcaatccagcctgtgagattaacagcctctgaccctgaaaaatgaacggtgtgcttgatgatgcggctgacataaccgcaaatgaatatgacggcaaaacagagcgcgtattcttttattttaatgctgatcggaagcaccttgcttacggtggccgcatgcatcagggtgacaaggaccatccccgttacaatcgcaagtgcggcgcccatgatgcccaaggaaggcctggtcgccaaaacaaaaattaggccagttttgacagcggcgccgataaaactgttcatcatggcggccccggctaaattgagagcctgcagcaccgcctgaaggggcccctgaaaatagtaaagcagaaaaaacggcgccatcactttaacaaataccgccgcattagttgatccgtacatgacggacatcagttcatcagcgaaagagaataaaataaccaccgaaatgcctccgcttaaaagacacagcctcatcgcctgttccagacggtattcgacaacttgcagctttttttgctccattccttcactgatcgcaggaacaagcgccgttgacagagaataggttataaagctgggcagcgtcaaaaccgtcatggcaaatccggtcagctccccgtactggctggtggcggcagcggtggccactcctgcaatcgcaaggctttgcgcgacgacaataggttcaaaaaaccaagataaatttccgatgaagcggcttccggttgtcgggagcgacacgctcatcagctggcggaaggtttcttttccatttgcgatcgacttgaaaaattgttttctgattctgattgttttatttgctttaaaacaaatgaataaataaataagagaggcaagctccccgatgacagacgaaatcatggctccggctgcggcatattcaatcccgtacggcagaaacaccgtcgtgcagaccgcgacaagtgaaatccgcacgatctgctcaagtacttgggaaaacgccagcgggttcatattctgcctgccctgaaagtaaccgcgcagcacgctggagatcgcgataatcggcacgacgggcgtaatcgccagaagcgggtaaaccgtgcgctgatccgtcagcatcgtttcggacataatcggcgcaaagcataaaaacagcggcgtgaagatgagacttaatatcccggtgacggtaagcgacatcactaaaatatgtttcattttctgccggtccccccgcgcgctcgcttcagcgacaagtttgctgatggcaacggggaggccgaattgagtcaaagtggtggccaagaaaaatgtcggggcagccatcatgtataaaccgaccccttcttcaccgataaaccgggcgataaccacccggttgacaaagccgagcattctcgtaatcatcccggctgcgatgagaataagagtgccccttaaaaaagtctgttttgccattttataaacccctgccttctcaaactacctggaatcatatacaataaagatatgcgccgatgtcgtccgagcatgacaagtcttcgagaaaaatggaaaaaggagcgagcgcccagtggagaaacatcccgccgaaatgtacaaagatcatttgcggcctttcttgtacagtaaacttgaagagttcaaaatcctcggatacgatgatgttgagcacgagagtttatggtcatacttaatacataaaaagtggaaacagaaaaaggaactgccgctgcatgaattggccggtcatattttatcagttaaaattggcgattttatgaactatgcaaccgttgaagcttttaagtcgtctaattggctggaaagcgatgagggtcaggaagctttagatgaactgctgagataatgatttgacggcataggtttaaggaggaaatacataatgaaaaaaggacgcttgattgcgtttttcctgattgtattattgatcggcacagggctggggtattttacaaaaccggctgccaataatattacgttaggattggatttacgcggcgggtttgaagttctgtacgatgtgcagcccgtcaaaaaaggcgataaaatcacaaaagacgtgctcgtcagcacggtgcaggcgctgaaccgccgggctaacgttctcggcgtaagcgagccgaacattcagattgaaggaaataaccgcatccgcgtacagctggcgggcgtcacgaatcagaacagggcgcgcgaaattctgtcaacggaagcgcagctctcgttcagggatacgaatgataaagagctgttaaacggctctgatctcgtggaaaacggcgcgaagcaaacctttgatccgacgacgaacgaaccgattgtcagcgttaagctgaaggatgcggataagttcggcgaagtgacgaaaaaagtcaagaaaatggcgcctaataatcagcttgtgatctggcttgattaccaaaaaggcgattcatttaaaaaagaagtcggcaaaaaacatccgaaatatgtatccgctccgaatgtgagccaggaattaaacacgaaggatgtcacaattgaaggccagtttaccgttcaaaaagcgaaggatttggccaatattttaaacgcgggcgcgctgcctgtgaaactgaccgaaaaatactctacttcagtaggggcgcaattcggacagcaggctttgcatgatacggtagaggccggcattatcggtattgcaattgttttcttatttatgctgctttattacagactgcctggactcatagcggtaattacgctttctgtatacgtgtatattacgcttcaagtgtttgactggatgcaggcggtgctgacgcttccgggtattgcggcgctcattttgggtgtcgggatggcggttgacgccaacatcatcacctatgaacggataaaagaagaactgaaactcggcaaatccgtccgctcagctttccgttcagggaacagacggtcattcgcgacgatctttgatgcgaacattacaacgatcatcgcagcggtcgtgctctttattttcgggacaagctctgtaaaagggtttgcgacgatgctgattctgtcaattctgacaagctttattacagctgtcttcctttcaagattcctgctctcccttctcgtggaaagcagatggcttgaccggaaaaaaggctggttcggcgtcaagaaaaaacatattatggacattcaaaaaacggatgaaaatactgaaccgcatacggcattccaaaaatgggatttcacgagcaagcgaaaatacttctttattttctcaagcgctgtaaccattgcgggaattatcatcttaatggtctttaaactcaacctgggaatcgattttgcaagcggcgcgcggattgacgtgcagagcaatcattctttgacggcgcatcaggttgaaaaagattttgattctctcggcatggagccggaaaacatcgtgctttctggtaaagagaaccatgttgccgcggcccggtttgtcggagagccatctaaagaaaaaatcgctgaaatcaaaacgtactttaaggacaaatacggatctgaaccgaacgtcagcacggtatcgccgacagtcggaaaagaactggcccgtaatgctttatatgctgtcgccattgcatcaatcggcatcattatttacgtatcaatacgtttcgagtacagaatggctatcgccgcgattgtctccctgctgtatgacgctttctttatcgtcgcgtttttcagcattacaaggctggaggtcgatgtcacctttatcgccgctattctcaccataatcggttactcgataaatgatacgatcgttacatttgaccggatacgcgagcagatgaaaaaacgtaagccgaagtcatttgccgatctggaacatatcgtgaatctgagcttgcagcaaacctttacacgttcgatcaatacggtcttgaccgttgtgattgttgtcgtcgtgctgctcattttgggctcatcgtcaattacaaacttctccgtcgctttattggtcggtttattgacgggcgtttattcctctctttacatcgccgcgcagctgtggcttgtatggaaaggtaaagaatttaaagggaaaaaatcaatcgaagagtaaaatgggaacaggctgtcttccggaaggcagcctgttttttcaggccgcattgaacttaaaacctgcatttgctataatgacatacgcttacataatcaatcatcattgtaaaaacatgtaggagggttcttatgaacgttcgtgagtcggagcttccgggcatcggccagaaagtagaagtcattacgaaaaatcacgataaaatcagtattattcttcatgatgacggcagaaaagagctctattacttcgatgagaatgatcatgacgaatgcttggcatccgttgaatttaacgacgaagaggcgaggcagatttccgctattttaggtggtatgacgtataagccgaaagcgctggaatctgtggaagtcgcgcttgatgacctcgtcattgagtggtttaaagccgaatctcatgcaccggctgtcagccgtacaatcggagatttggagatcaagaaacattacaacgtccagattattgcgatcgtaaagaaaaaccggcaaaaacagctgagccccggcattgataccgtaattgaagaaggggacaccctcgtcatatcgggagaaaggagcggactgaaaaagctggtccgcgagcagttaacggcccggatttcctgagaccggggtttactcccgggaaaatgggggaaaagataagaatgaacaattgggggcagacgcatgaataaacaatggactattatattcgctttactatttactttgattgtcgccatctttgctgtcattaacgtgcgggcggttgaggttgattatctgttcggaaccgctgaatggccgctgattttagtcattttaggctctgtgttaatgggagcgctgatcgtgttttcagccggtatctttcaagtgatgaagctgaagcgcgaaattaaaatgctgcggaaagaaaacagatctgcggctgaattgacggctgattcggacggcaaaaaaacagccgcgccgccggaagaaatgcttgaagagaaaaaaggatcagaataacatttgaaacccctcagtccgctctagtataatagggtggttgaggggtgaatttatgttagcgtcaaaaatgcgctgggaaatccagcagccggatcaggaaaaagtcaaatcactcacagaacaattggacataacacctcttgtggcatcactgcttgtaaaaagaggttttgatactgccgaaagcgcaaggctgtttttacatacaaaggatgcagacttttatgacccgtatgaattaaagggaatgcgggaagcagttgatcggataaaactggcggtttctcaaggggaaccgattatgatttacggagattacgatgcagacggcgttacaagcacgtcggtgatgctgacggcactcagacagctgtcggcggacgttgacttttatattcccgaccgtttcacagaaggctacggcccgaatgaacaagctttccgctccataaaagagcggggattttcgctgatcattacagtggatacgggaatcgccgccgtccatgaagctgaagtcgcaaaagagctgggcttagacgtcattattaccgaccaccatgagccgggacccgagcttcctgacgtatttgcgatcatccacccgaagcagccgggctgcggctatccgtttaaagaattggccggcgtcggtgtggcgtttaagcttgcccacgcgcttacgggttctttgccggaagctatgctggacttggcggcaatcggtacggttgcagatctggtgcctcttcatgatgaaaacagattaattgcgtcactcggaatcgaaaggcttcggacgacaaatcggccgggcctcaaagccctgattaagctttccggcggagatatcggacaagctgatgaggaaacgatcggatttcaggtcgcgccaaggctcaatgccgtcggaagaatagaacaggccgatcccgccgtccatctgctgatgaccgaagatcagtttgaagcggaggaactggcttcggatattgaccggctgaataaagagcggcagaaaatggtgaaaaccatgaccgaagaggctgttgaaatggttcagcagcaaggcggaaacccgtctgccattgtagtggcaaaagccggctggaacccgggagtcgtcggtattgtcgcatcgaagctggctgaacgtttttaccggcccgctgttgtgcttgggatagatgaggagcagggaatcgctaaagggtcggcgcgaagcatcagaggcttcaacctgtttacgagcctttcacagtgcagagacattcttcctcatttcggcgggcatccgatggcggcaggaatgacgttgaaggctgaagatgtggcggaattaagggacaggctgaatcaaatggctgaagaaacccttacggaagaggattttattcccgttcaggaggttgatcttgtctgcggcgttgaagacataaccgttgaaagcattacagaattgaatatgctgtcgccgttcggcatgcttaaccctaaaccgcatgtgatggtgaaaaatgcggtgcttgatgatgtgcgcctgatcggagcgaataaaaaccacgtgaaaatgacggtaaaaagtgattccgccgtccttgactgcgtcggctttaacaaaggagagcttgaagccggagttgtccccggatcaacgatttccattgtcggcgagatgtctattaatgaatggaacaacagaaagaagccccagctgatgattaaagacgctgcggtgccggaatggcagctttttgatatcaggggcaagcggacgtgggaagacacggtcaccgcgctgccgaaggaaaaacgggtgctcatcagctttaacgaaaaaaccgctcagaagctccatgcaaaagagctgtcgggcgagctggccggtatcacttcggaatccgaggcggaagctctccagcttgacggaaaatatgccgtttttctggatgtgccgccgtcagcggatcgcctgcagcatttgcttgacggaaagaagccggaacggatttattttgtttttatcaatcatgaagaacatttcctgtcctcatttccatcgcggaatgatttcaagtggttttacgcatttctcttgaaaaggggcgcttttgacttcggcaagcatggttcagagcttgcgagacacagaggatggtcaattgacacaatcaatttcatgacaaaggtgttttttgatctcggttttgttaaaatagaagatggtgtgctgtctgtcgtgagcggcgcgaaaaaacgcgacctggcagattcgcaaacctatcaggtaaaacagcagctgatggaattagaccagaagctcaattattccgcagcccatgagctgaaggaatggctgaataagctgatgaaccaaggttcagaagcttatgaaagtacgaggaggacatagaacagatggatcttaaaaaatacgtaacaattgtgcccgattacccgaaagaaggcgtacaatttaaagatattacgacattgatggacaaaggcgacgtataccgttacgccactgaccaaattgttgaatatgcaaaagaaaaagaaattgatttagttgtcgggcctgaagcgcgcggctttattatcggctgtccggttgcatacgctctcggagtgggctttgcgccggttcggaaagaaggaaaacttccgcgtgaggtcattaaagtcgattacggtttggagtacggaaaagacgtactgacgattcataaagatgcaattctgccgggacagcgcgtgctgattactgatgacttgcttgcaacaggcggcacgatcgaagcgacaattaagctggtcgaagaactgggcggcgttgtagccggtattgcgttcttaatcgagctttcttaccttgacggcagagacaagcttgacgattacgatattttaacattaatgaaatattaaccgcatatggaaaaaagcactcgtgtcagggtgcttttttcctattatttcatcatcctgacagattctttaggtgttttgaacttctgccctttacatctctcgtttttttcttgataataaactaatacagtttacatttaaaaaaggtgattccatggcgaacgaacaagtattgactgccgagcaagtaatagataaagcgcgcacttatctgccggaggagcagattgcgtttgttgagaaagcttacctgtatgcgcaaaacgcgcatcgcgaacagtaccgcaaatcaggtgagccgtacatcattcatccgattcaggtggcggggatcctcgtcgatctggaaatggacccttccacaattgcgggcggatttctgcatgacgtggtagaggacacggatgtcaccctcgacgacctgaaggaagcattttctgaagaagtggcgatgcttgtcgacggcgtgacgaagctcggtaaaattaagtataaatctcaagaggagcagcaggcggaaaaccatcgaaaaatgtttgtcgctatggctcaggatatcagagtcatattgatcaagctggcggatcgccttcacaatatgcggacgttaaagcatcttccgcaggaaaagcagcggagaatttcaaatgagacgctggaaattttcgctccgctggcccatcggctcgggatttctaaaatcaaatgggagctggaagacaccgctctccgttatttgaatcctcagcaatattacagaatcgtcaacctcatgaagaaaaagcgcgcggaacgcgaactttatgtcgaagaggttgtcaatgaagtgaaaaaacgcgtcgaagaagtgaatatcaaagcggacttttcaggacgtccgaagcacatctacagcatttaccgcaagatggcgctgcaaaataaacagttcaatgaaatatatgatctgctcgccgtccgtattcttgtcggaagcattaaagactgctacgccgtactcggcattattcacacgtgctggaagccgatgccgggcagattcaaagattatattgcaatgcctaagccgaatatgtatcagtccctgcatacgaccgtaatcgggcctagaggcgatccgctggaagtgcagatcagaacatttgagatgcatgagatcgctgaatacggggtggccgcacactgggcatataaagaaggcaaggctgcaaacgaagaagcgacatttgagaaaaaactgtcctggttccgtgaaattctggaattccaaaacgagtctaccgatgcggaagaatttatggaatcgctgaaaatcgatctgttttctgacatggtatacgtatttacgccaaaaggcgatgtcattgaactgccgtcaggctctgtgccgattgatttttcctacaggatccactcggagatcggcaacaaaacaatcggggcgaaagtgaacggaaaaatggtgacgcttgaccataagctccggacgggcgacatcgtcgagattctgacgtccaagcattcatacggtccgagtcaagactgggtcaaactggcgcagacgtcccaggcgaaacacaaaatccgccaattctttaagaaacagcgccgtgaagaaaacgtcgaaaaaggccgtgagcttgtcgagaaagaaattaaaaatcttgattttgaagtgaaagatgttttaacactcgaaaatcttcaaaaagttgccgacaagttcaatttctcaaatgaagaggatatgtacgcggcggtcgggtataacggcattaccgctcttcaggtggccaacaggctcaccgaaaaagaacggaagctgcgtgaccaggaagagcaggaaaaaatcgttcaggaagtcacttccgagccgaaacattatccgcaagggagaaaacgggaagcgggtgtgcgcgtaaaaggcattgacaaccttctcgtccgcttgtcgaaatgctgcaacccggtgccgggcgaccatatcgtcggttttattacaaaagggcgcggtgtatccgttcaccgggatgactgtccgaacgtcaaaacgaatgaagcgcaggaacgtctgatccccgttgaatgggagcatgaatcacaggttcaaagacgcaaagaatataacgttgagattgagattttggggtatgaccgtctcgggcttttaaatgaggtgctccaagccgtaaatgaaacgaaaaccaacatctcctctgtctccggcaaatccgaccgcaataaagtcgctacgattcatatggcgatttttattcaaaacatcaatcatctgcataaagtggtcgagcggattaagcagatcagagacatctattcagtccgccgggtaatgaactaaaaggagcttgctatgaaattagttgttcagcgtgtaacagaagcgagtgtgacggttgacggcgctgttgccggccggatcggacccggtattatggcgcttgtcggcatcactcatgaagatacagaagaagatgccgcttacttggcggataaaatcgtgaatcttcggatttttgatgatgaaagcggcaagatgaatttatcgcttttggatacgggcggggagattttatccgtttcacagtttacgctttacggcgaaacgaagaaagggagacgcccgaattttatgaatgcggctaaaccggatcaggctgtgctcctttatgaaaagtggaacgaactccttcgggaaaaaggagtcaaagtggaaaccggaatattcggagccatgatggatgttcagctgacgaattccgggccgattacattgattatggattctaaacaataaaaaagctgccgttcggcagcttttttttatgattgaaaataatgttccaatccgctttcaattccgtctgtcactttttcctgataagagccgctatgtatgattgtttcttcttgcggttgactgagatagccgagctcatacagcatggcaggccgtttattttccctcaggacgtaataatcgccaaacagaacgccgcgatccgggataggggaacgcttcactacttcagaatggacgtctgaggcaagctggcgatccttagacggactgtaataataagccgtgcttccccgtgttgacgtatcggcatagctgtcatagtgaatgctgataaaggcatccgcattccggtaatgagaggttgaaaccctagcctgcaggctgataaaagtatcatcctgtctggtgatatacacgtttgcaccggccgcccgcaatttttgggccagcagcttagcggttttaatggttacgtttttctcaaactttccggagtagccgatcgttccgctgtcttttcctccgtgtccgggatcaacgacgatcgttttgtttttaagtgagccgctgccgcctgacgtgtcgggagaaggtgcttcacctgtttcctcaccgctttttgacgtttgtacgacccagtttgccacatatgcggtttgtccgttttcaagccggacttcataccatttgccgcttgagccgacaatcgggtaggctgcgcctttatctgctctttttacgatagaagcggaagttgaggccgagctccttaagttggtgccgccgtaaacaatatacgcttttttcgaggagcctgagcccgcagaaccgtctcccgagccggatgcgctgtccgatgagtcagaatcctttatgatgtagtggcttgctgcccagcctttttgcccgtttgcttcaattttcagccagccgtggtcttcacttaagatggaaacctttgttccgcgtgataatttagtcataatcgctgaatcatgtgacgctgcacttctgacattcaatgaagaaacgccgacagtcccgttttttgacccgcttcgggccgaagttgctttcgtatccgatccgccgctgtccgcggtgacgtattcggaagaaacccatccggttgtgccttgataagaaatgttcacccatccgctgttcttgtcaagcacggatgcatgtgcgccttgcggaagtttgccgatgacttcatatgatgtccccgggccttttctgatgcggaggtcaggatcggtggaagtgaccgttccgcttgttgcggatgaatggtctgctcctccggttgtttttgatatcagccaggaaacgacccatccggttttaccggggctcagctgaagctgcacccagtctccctcttctttagcgatcgggtatctttcccctttttttacttcagccttaattccatagctcaggccgggaccgcctctgacattgatcttgtctgtcgcgatgaccgcttctccctctgcggcgattgcggtgtggaatgacggaagaagcgctgtgatgatgacgccgcataaaataagagcaagagttctcttcttcatggctgtcctcctttctgaactaactaaaatacattcttgtataatatcgtattttccttgctgaatgttaaataaaaataaaatggtttgtttatactagtcataaatacagcgaaaaggtgtgcaaatcatgaaatatcaaccaaaaatgggacgcgcgctgcacgatgcggaaggaaatctgcacttcagtgatcagagcgatagagaaaaggcgggttttcttgaagagacggcgacggagttcggtcttttatcgaaagatgcggtcgcaaggaaaaacagacggaataaaacttgacaggggagtgcaatcccattattataatagaaattgatgtacataagtcatgataacgattttgaaccgataatggagaagagtaggtcagaatgcatggagaagagaggaaccgtcccgggctgaaagcggatccgcactgcatctttctcgaaacaacactccggaggttccctgctgaacgcttttgtaagtcattaggcagcggacgtgaacctgcgttaaaggtcagagcggggatgcttcggcattccaactagggtggcaccacgggtataactctcgtccctactatacatgtatagtaggagcgggagtttttttatttgaagaaagacattaaggaggcctgtaacatggcatatcacattccaagaggcacacaggacatactgccgggtgaatcagacagatggcagttcgtcgaacaaattatgagggagacgtgccgcacttatcaatataaagaaatccgcacgccgatcttcgaacatacggaattgttcgcaagaggcgtcggtgagtctacagatatcgtgcagaaagaaatgtacacgtttgaagaccgtaaagggagaagcctgacgcttcggccggaaggaacagccgccgcagtccgcgcgttcaatgaaaataaattatttgcgaacccggtgcagccgacgaagctttattatgtcggaccgatgttccgttacgaacgtccgcagacagggcgtttccgccaattctatcaattcggaattgaagcgatcggctccaaagatccggccgtggatgcagaagtcattgcgcttgcgatgagtatttaccgtaaagccggtttgaaacatgtcaagcttgtgctgaacagccttggtgaccaggacagccgcaaatcctaccgggaagcgctcgtcaaacattttgaaccgcgcatcggagagttttgctcagactgccagtcgcgcctgcacacaaacccgctcagaattcttgactgcaagaaagacagagagcatgaactgatgaaaacggctccgtccattcttgattacttaaatgaagaatcagccgcttattttgagaaagtaaaacaatacttaaacgatctcggcatcccgttcgaaatagatccgaaccttgtcagagggcttgattattataaccataccgcttttgaaattatgagcaatgccgaagggttcggagcgattacaacccttgccggcgggggccgctatgacgggcttgttgaacagatcggcggacctgaggcgccgggtatcggatttgcgatgagcatcgaacgtctgctggcagccattgacgctgagaaaacagagcttcccgtcaatcaggggattgactgctacatcgtgacgctcggagaaaaagcgaaggattattccgtttccctcgtgtacaaactgagagaagcgggcatctcaagtgaaatcgattatgaaaataaaaagatgaagggccaatttaaaacagctgaccgtctcggcgcacgttttattgcgattttaggggaagatgagcttgcccaaaataaaatcaatgtaaaagatgcggaaacaggagagcagcgtgaagtggtgttagacgagctgatacaagtgttaaaggcagatcaaaagcagtgaaggagaggaacgctatgtttggaagaacatattattgtggcgagataactgaaaaagcgattggcgaaaccgtcaaactgaaagggtgggtgcagaagcggcgcgatctcggcggcttgattttcattgatttgcgcgaccgctcgggtattgtgcaagtcgtgttcaaccctgacgtatcgaaggaagcccttgccgcagcggaagcaatcagaaacgaatatgtgcttgatatcgaaggcacggtttctgcccgtgaagaaggcacggtgaatcccaacctgaaaaccggtaaaattgaaatcaaagctgaagcggtgacggtgctcagtacggcgaaaacgcctccgtttccgatcagtgaccaggcggctgaggtttctgaagacgtccggttaaaacaccgctatttggatttgcgccgcccggcgatgtttcaaacattgcaaatgcgccaccaagtcacaaaatccatccgccatttcttggatgaaaacggatttcttgatattgaaacaccgattttaacaaaaagctctcccgaaggcgcccgtgattacttagtgccgagccgggtgcatgaaggagaattttacgcccttccgcaatcgccgcagattttcaaacagcttctgatggtgtcgggctttgaacggtattatcaagtggcccgctgcttccgcgatgaagacttgcgtgccgaccgccagccggaatttacgcagattgatattgaaatgtcctttatgagtcaagaggacatcatggctctggcggaagagatgatggcgaaagtcatgcttgaaacaaaaggtgttgaagtaccgcttccgcttccgcgaatgacatatgaagaagcgatgaacagctacggttccgacaagcctgacacccgcttcggcatgctgctgacggacgtgtcagacatagtgaaagatactgaatttaaggtgttctcatcagccgtggcaaacggcggcgttgtaaaagcgatcaatgtcaaaggcgctgccggcgactattccagaaaagatatcgatgcgctcggcgtttttgccggaaattacggcgcgaaaggtctcgcttgggtgaaagttgaagctgacggcgtaaaaggcccgattgcgaaattctttgatgaagagaggcaggcaaaactggctgaagcgcttgatgcttctgaaggcgatctgctcctgttcggggctgataagtttgaggttgtggctcaatccctcggcgcgcttcgcttaaagctcggcaaagaacgcggcctgattgacgaaagcctcttcaacttcctgtgggttgtggactggccgttactggagcatgacgaggaagaaggccgtttctatgcggctcaccacccgtttacaatgcctgtccgtgaagatcttgacctgattgaaacggcgcctgaagatatgaaagcgcaggcttacgacctcgtcttaaacggctatgaactcggcggaggctcaatccgtatttttgaaaaagacgttcaggaaaaaatgttcgggcttctcggctttacaaaagaagaagcggaggaggagttcggataccttctcgaagcctttgaatacggcgcacctccgcacggcggaatcgcgctcggcttagaccgtttggttatgcttcttgcaggccgcacaaacttaagagatacgatcgctttcccgaaaacggcaagcgcaagctgccttcttacggaagcgcccggcgaagtgagcgacgcccagcttgaagaacttcacctttctgtcaaaagaaaagtgaaacagtaaagatcagcagtttgtttcttgaaaatcaaaatctgctgtgatatgattttgacaagttaaataaagtcctgatgtgttagttgtacacctagttttgaccgaacatttttttgatttgggagcccgtatttttaaatggcgtacatgcctcttttcattcgttaagaggacttacaagatttaaaaaagggcacccacctgctgagagcgggttcaaaacgaaggaaagctgcaacggcacaattgggactttattttttgtgcgctaaaaccagcggctttttgacaagccgagtttataaaaccagaatgtggagtgaggttcttgttacatcagttttccagaaatgagctagcgattggaaaagaagggctggacacgttaaaaaacagcacggtggccgttctcggcgtcggcggagtcggttcattcgcagccgaagcattggcgaggtccggagtggggcggatcgtgcttgtcgataaagatgatgttgacattacaaacgtaaaccgccagctgcatgcgctcttgtcgacggtgggacagccgaaaacagacttgatgaaagagcggatcgcggatattaattcggattgcgatgtcgtcgccttaaaaatgttttatacggaagagacgtatgagcagttctttgagcatccgctcgattacgtcattgacgcgtcggatacgattcattataaaattcatctgatgaaagaatgtctgaaacggaatgttccgctgatttcaagcatgggagcggcgaataaaacagacccgacacgctttcagattgctgatatttcaaaaacccataccgatccgattgccaaagtcgtccgcacaaggcttcgtaaagagggcattaaaaaaggcgtacaggtcattttttctgatgaaagcccgatcgtcatccgtgaagacgtcagaaaagaagtcgggaatgatgaagcgaaaatccgcaaagcgcaaatgccgccgtcttccaacgcctgggttccgtcagtggccggtctgattatgggcggacatgttgtcatggagctcttaaaggacatcgacattaaacgggttaaagataaataaaaagaaaaacagccttcttcaggaaaggctgttttttttatttgaatcctccgtttacacgaaagatcttggccggtatcaaaaaagacaagaacacatagggtgtccttgtccggttattttttctgcttcatcagtttttcatacacttgctttatggcggcttcaaatttccccgtttgtttcggtttatagtattgcttgttttttaacggatcaggcaaatattgctgttcgacccatccgttctcgaaatcgtgaggatattgatagccgatcccgcgtccgagctcttgggcccctttatagtgggcgtcttttaaatgtttcggcacatcgccgattttacccgtcctgatgtctttgagcgcctcatcaacggctgagatggcggagtttgattttggcgagaggcataattcgattaccgcattggccagcggaattctcgcttccggaaagccgatccgttctgcggtctgaatcgcgctcagcacccgggggcctgcctgcgggcttgcgaggccgatatcttcataggcgatcacgagaagccttcttgatatgctttcaaggtcgccggcttcgatcagacgggccagataatgaagggcggcgtttgcgtccgagcctcggatcgatttttggaaggcggataagacgtcataatgcgcatcgccgtttttatcatgagtatagctttttttctgcagacattcttccgccgtctcccgtgtaatccggaccgtgccgtcgcttgattcctttgtggagagcacggcaagctccagtgcgttcaaagcggagcggacgtctcctccgcacccttgtgcgaaatgatccatcgcgtcgtcgtccaccgaaacgctgtaagaaccgagtccccggtgttcatctgtgagcgctcttttcaatgcctgcttgatcagatcgggtgttaacggttcaagctcaaatatctgggtccggcttctgatggccgggttaatggcatgataagggttggcggtcgttgcgccgattaaaataatcatgccgttttctaaatagggcagcagaaaatcctgctttcccttatcaagcctgtgcacttcgtcaaggattaaaatgacctggcctgacattttcgcttcctgtacgacaatctccatgtcttttttattatgaatgacggcattcaatttcctgaatgcgatgcttgtcgatcctgcgatcgctgtggcgatggatgtttttccgatgcccggcggtccgtacaggatcatggatgataagtgctttgcacgcaccattctgccgatgattttatcttctttgaccaaatgttcctggccgataatgtcttcaatattggcaggccgcatccgatacgccagtggtttcatgaacatctctccttacatatacagggtaacggaaaacggacgattagaaaagcgaattgcggcgggccccgtgtttcaatgaaaattaggataagttatgttataataacagttggtctataagatactaaacagattattcatatccatttacttgtataaattaacaattagaattgactggggtgttcatattgaaaatatcgacaaagggaagatacgggctcaccattatgattgaattggcgaaaaagcacggagacggtccgacgtcgctcaaaagcatcgcccaaacaaacagcctttctgagcattacttggaacagcttgtatcaccgctcagaaacgccggactcgtaaaaagcatcagaggcgcttacgggggttacgtgctcgggggccagcctgaagagataacggccggagatattatcagagtgctggaagggccgatcagcccggtagaagtgcttgaggatgaagagcctgccaagcgggagttatggatccgcatccgcgacgctgtaaaagacgtgctggacagcacgacgttagaagaccttgcgagctacacggacggcgagcaggaagcttatatgttctatatttaaaccagaggtgtacagacaatggaacggatttatttagatcatgccgcgacttccccgatggatgagcgtgtgctcgaagagatgaagccccatttcttcggcagtttcggcaacccgtcaagcattcattcattcgggagagaatcccggaaatgggtcgatgaagcgagagcggacatcgcgcgcgaaatcagtgcgaaagaacaggaaattattttcacaagcggcggcacggaggctgataatttagcgattttcggaacggctgccgcccggaagaatgaaggtaagcatatcattacgaccgctattgagcatcatgctgtattgcacgcctgcgaaaagctggaagaagacggctttgaggtgacatacctcatccccggcccttcaggacggatcagtgcaaatcaggtgaaagaagcgctccgtgatgatacaatccttgttaccgtcatgtatggcaataacgaagtcggtaccattcagccgattgacgaaatcggagagctgttaagcgggcatcaggcctattttcacacagatgccgtccaggcattcggttatatgccgattgacgtgaaaaaaagcagaattgacatgctgtctgtttccggtcacaagcttaacgggcctaaagggacaggctttttatatgtaaatcaagaggtgaagctgtcaccgattcttctcgggggagagcaggaacgaaagcgccgcgcggggacggaaaatgtaccgggcatcgccggcttaaaagaagcggtcgtcctttcaaaccgtgagagggaagagaaaacagcgaagtataaggagtttaagaacattatcatgagcacgctggaaaaatccggcgtcacagcggaggtgaacggagatgccgagaaatgcctgcctcatattttaaacctttactttcccggtgtgccggtggaagcgctgctggtcaatcttgacatggaaggcgttgccgtctccagcggatctgcttgtacggcaggatccgttcttccgtcccatgtgcttacggccatgttcggaagtgagagcggcaggctgacttcgtcaatccgtctcagcttcggcctcggcaatacgccggaacaaatcgaaacagccgccgaaaagcttgccgccgtcgttaaacggcttgcttaaaacggcggacttacgtttttaatggagtgaatgcaaatggaaaaacggccggaggatacaagagtcgtagtcggcatgtccggcggtgtggactcttccgtggcggcccttctgctgaaggagcagggctacgatgtaatcggaatctttatgaaaaactgggatgatacggacgaaaacggtttttgcacggcgacggaagattatgaagacgtcatccgggtctgcaaccagatcggaattccgtattatgccgtcaattttgagaagcaatattgggaaaaggtatttcaatatttccttgatgaatataaagccggaagaacccccaatccggatgtcatgtgcaataaagaaattaagtttaaggctttcttggatcatgctctgtcactcggcgcggattatcttgcgacgggccattacgcccgcgtggacagaagcgcaggtacagtgcgcatgctccgcggtctggatgaaaacaaggaccagacttattttctgaatcagctcaatcaggaacagctcagcaaagtcatgttcccgatcggtgatctgcaaaaaagccgcgtgcgggaaatcgccaaagaagcggaacttgcaacagctgcgaaaaaagacagcacgggaatctgctttatcggcgaacgcaacttcaaaacgtttctcagccaatatctccccgctcagccgggcgatatgatgacaatggacggagaagtaaaagggcgtcatgacggtctgatgtattatactatcggacagcgccacggtcttggaatcggcggaagcggcgagccgtggttcgccgtcggtaaagatcttgaaaaaaacattctgtatgttgatcaaggattccataatccgcttctgtattctgataagatcacggcgacaaatgtcagctggacgcgtcccggtctgatggacggcggcgaaatgacatgcacggcgaaattccgctaccgtcaggaagatcacaaagtaacggtgaaaatgacgggtgatgatgaagcggaagtcatttttgacgggcaggtacgcgccgttacgccgggacaagccgtcgttttttatgacggagaagagtgcctcggcggcggaacgatagatgacgtttataaagacggaacaaaactgtggtacgtataacacatgtaaaaaacctcaactcgcatgttggggttttttagcgaaaggaagttaaaaatggattataataaaatcgggattgacgccatgcaggagggcgattttgaaaaagcggcagaggcttttacgaaagcgattgaggaaaacgggcaagatccggtgccatatatcaacttcgcaaatctgctttcttctgtgaacgaactcgaacgggcgcttgcattctataacagagcgctcgaattggacaattcggcggcagccgcttattacggtgcgggaaacgtatatgtgatgaaagaatcgttttccgaagcgaaggatatgtttgaaaaagcgcttcgctccggaatggaaaacggagatttgttttatatgctggggaccgttctcgttaaattagagcggccgaagcttgcactgccatatttgcagcgtgccgttgaattaaacgaaaatgacacggaagcacgcttccagttcggaatgtgcctcgcaaacgaagaaatgctggatgaagctctggcgcagtttgagacggtgatcgagcaggacccaagccacgcggacgcaatttataatgccggggtcgcttacgcgtacaaagaaaatcgtgaaaaggcgcttgagatgctggaaggcgcaatcggcatacagcctgatcatatgcttgcgcttcatgcgaaacagcttatcacccagtcataacaaaaggagggaaggctcgtggatcagctgaacatcgaggaacagccgtatgtaaaaggcgtcattcatacggtcatttatcataatgacaccaacctgtatacagtgctgaaagtcaaggttgcagaaacgtctgaggcgatcgaagacaaggtcgtatccgtaacgggctacttccctctgctgcaagaagatgagacctacacattttacggaaaaaccgccacgcatcctaagttcggcctgcaatttcaggctgagcactttaaaaaagaaattccgaccacaaaagaagggatcattcactatttatcaagtgatctgtttgaaggaatcggaaaaaaaacggcggaagaaatcgtcaaaaagctcggagacggcgcgctcaataaaattctgacggatgcgtcggtgctttacgatgtgccgaaaatgtcgaaaaagaaagcggataagcttgccggagagctgcagcggcatcaggggcttgagcagattatgatctctctgaaccaatacggtttcgggcctcagctatccatgaaaatatatcaggcctacgaaacggaaacactggagaaaattcaggaaaatccttatcagcttgtaaaagacgttgaaggcatcggctttgtgaaagctgacgagctgggcggaaaaatgggtctgtcaggaaaccacccggagcggatcaaagcggctatcttatatacaattgaatcgacctgtctttcagagggccatacgtacatagaaacaaagcagctgataatcaatacgcaaacgctcctgaatcagtcagctgaaggcggccgcgtcacggaaatggatgcggctgacggcatcatcgccctcggggagagtaaggatatcgtcatagaaggagaacgctgctattttccgtccttgttttacgccgaacaaaatgtcgcaaaacgcgtgctcgacattgcggctcagacggagtatgccgatcaatttcctgaatcggaatttctgcttgcactcggtgaactggaagaacggatgaatgttcaatacgcaccaagccaaaaggatgccattcaaaaagcgctgtcttcaccgatgcttttactgaccggaggacctgggacggggaaaacgaccgttattaaaggaatcgtggaattatacagtgaactgcacggagtatcgcttgaccccggtgattataaaaaagacgaggcgttcccggtgctgcttgccgcgccgacgggaagagccgcaaaacggatgagcgaatctacgggtctgccggctgttacgatacacaggctgctcggctggaatggcgctgaaggctttacctacaatgaagatcagccgatagaagggaaactgatcattatagacgaagcgagtatgctcgatatctggctcgccagccatttgtttaaggcgcttcctaagcacattcagctcattgtcgtcggtgatgaagaccagcttccttcagtaggaccggggcaggtgctcagagaccttttggcttctgaggtgctgccgaccgtgcgcctgacagatatttaccgtcaggctgaaggatcatccattgtggaacttgcgcatgatatgaaaaaaggactgcttccaaaggggctgaccgcgccgacaaaggaccgctcatttatccgctgtaattcttcacagattaaagaagtcgtggatcaggtcgtttcgaacgcgttaaaaaaggggtatacctccagggatattcaagtgcttgccccgatgtacaggggaaaagcgggaattaacgagctgaatatgcttcttcaagacatcatgaatccgccgaaagaaaaaaggcgggagctgaaattcggagatgtcgtctacaggacgggcgataaaatattgcagcttgtcaaccagccggaaaacaatgtgtttaacggcgatattggcgaaatcgtgtccattttttatgccaaagaaaatacggaaaaggaagacatggtcgtcgtctcatttgacggcaacgaaatcacctttacgaaaaaggatttcagccagtttacccacgcgtactgctgttcgattcataagtcgcagggaagcgaattccctattgtcgtcctgcctgtcgtcaaaggctactatcgaatgctcaggagaaatctgctttataccgccataacaagagcgaaaaaatttctgattctttgcggagaagaagaagcgcttgaatggggcgtcaaaaacaatgatgccaccgtcagacagacgtcgcttaaaaacaggctcacagagcagactgaagagatggatgcagaactggccgccctgcaaaaagagctgccgttcagtgtatatgatgcgaacatcggaatggaaggcatcacgccgtttgactttatggaagaaaaagcgtaaataaaacccggagcataaacatgcgccgggttttcgcctgtggaagtcatttcaaagtatgctgcccggcttcttggcaaaacctatacgtgttcaacaaaaggtggttgatcacactttgagaacatgccatgcagctgaaggacgaacagtatatgacgaaaacaccgggcgcagtctcgggatgatatcggatgtatgtttctctctggacggccggtttctcggtttcgtgctggagcagaaacgcctgtttcataaccgccatctttttttagaggcaagtgatataaaagagatggatcaagaagccgtagctgccggtcatgctcatttgcagcctttgccgaagagctgtttcacctttgaacagattaagatgcagccggtgaaatcgcctgatggtgaaatgttcggtttgctggaagatgtatacttttgtttggacaggggcataatcgtagcatatgaactctcggacggcttcttttcagatctggctggcagacgccaagtgcgccgcgccgccgatacgcttattgaagcggggaaagaaggcatcgtcctgaacggataagaggtgtagtctgtgcttgtatgtccgaactgcaaaagtaaagatatcggcaaaatcggcgtaaaccaatactattgctggggctgcttcattgagctgacggtggccaaaggcaaaattgcgacacatcaagtagaggaagacggcacgttaagcagtcttgatgatttgttttctgaagacgaacgcagtatcaatttttaaagttgaaaggagatacgcgcgatgggcagaacaatgacctctctgttggctttaggagctggagccgttatgtatcgtatggcttctcagtccgatatgctgaataaaaaaggtatgaaacggatgagaagacgagtcatgaaaatgttttaagcagaaaaaaggatacttctccggaagtatcctttttacgtttgtctcgcttccagccgtctggctgcgagagacaggcagtaattgaccgcgaaatacatcagggccgccagcagaaagatcgggaaaaaatatcccccgtcagcgctttgtccgtttaaaatctgcgcgttatgaatcagttcgggcagagcgatgacgaccgcaagtgacgtatcctttaataaggagataaactggctcacaatcggaggaaccatacgcctgagcgcctgcggcatgacgacgagaaaaagagtctgcgtgtacgtcagtcctgaagaacgcgccgcttcaatctgtcctttgtcaacggattgcaaaccgcttctgatgatttctgacagcatggccgattcaaaaatcgtcagcgccgtgatggcggccgcggtaatttccagtttgatcccgatttccggtagggcaaaaaacgtaaagaaaatgattaataacagcggcaggttgcgaatggtttccacaatggccgctataatgcccgagacgataggaattttcgcatagcgcaaagtgccggcggcaagcccgaaaataaaactcaggacaatggagatcagcgcaacataaagtgtgaccaaaaagccgtcccataaaaacagcagatggtcaggtgtataggcgccgctaaaatccatgtttttcactctccttctctaataactctttccgagacgtctttccaaatagtgaaccccgatgctgagcgggatcgttactatcaaataaaaaagcgcgacgaaaatatagacatcaaacacgacaagagtgcttgaggaaacgagatccgcctgatacatcaaatcgagtcccgccaccactccgagtattgatgagtttttgacaaggttgagaaattggtttccgagcgggggaatcacgatttttacggcctgaggaagaatgacgtatctcatcgcctgactgtaggtgaagcctgacgatctggccgcttccatctgccctttggagacagtctgaattccggctctgatggcttctgcgataaaggccgacgtgtatatcgtcagcgcaatcgttcccgcctgaaagccgtccagtctcagcccggcgttcggaagtccgaaataaaaaacgaatgtgatgaggagaagcgggatgttgcggataaattccacatacgcagtgccgatccattgaaggggtttgaaagccatgattctcatgactgcgatcagaacgcccagcgcaaagctgcctgccagcgcgatgaagctcgcaagcaatgtgtgcaggaaaccgtccatatacatatcgaagttttccgttaaaattgaaaagttcatctatgtcactccttataaaacggggatgagcatgcctgctcatcccgcggtcctttctattttgccggttcttctttaatccattttttatagattttttcgtacctgccgtcggctttcatttttttcaaagaggcgttgatttccttgatgagtccggattggccttttttgacggcgattccgtaaggttcatcggtgaaggtttcgcctgtcagctgatattgtttattttcatctgccatgccgtataaaatcgcattatcagttgtgagcgcatctccctgtcccgctttaagcgcagtgaacgcttcggcgtaattttcaaattccagcactgaggcgtcaggcgctttttctctgatgttttgtgaggaagtagagccttttaccgccaatacttttgagccttttcccaggtcttcggtgcttttgatgctgcttccttttttgacgagcagggattgcccggcttcaaaataaacatctgagaaatcaacttcttttttccgctcatccgttattgtcatcgtggcggtgatggcatcgatatcgccgttttgcagcatcggaattctcgtttttgacgtcacttctttaaattccgctttcttctcatcccccagaatatcttttgcgagctgttttgagatatcaatatcgaagccttcaatatcaccggagcttgggtttttcagcccgaataacctcgtgtcggttttgacgccgaagatgattttgtctctgtctttaatagaggctaacgtgtcttttcccgttccttttgaatctccggacgtttctttccctccgcaggcggccagcataaagacggccagcagtgatatcaacccgaatgacaaccattttgttacacgtgacataagcactcctccgtttcttttcagtgatttaaaatacggcttaagaataaacgcgccctctcttcacgggggctttcgtaaaattcagccggtgcagcttcttctaagatggctccgccgtcgataaacacgatgcggtccgccacttcttttgcgaatcccatttcatgtgtgacgactgccatggtcatgccttcctttgcgagtgttttcatgacatccagcacttccccgatcatttccggatcaagcgcggatgtgggttcatcaaacagcataatttcgggcttcatcgcaagccccctggcgatggcgacacgctgctgctggccgccggaaagctgtgaaggataagcgtccgctttttccggtataccgacttttttcaaatagtataaggccgtttcttttgcttcttcttttgattgcttaagcactttgatcggtgcgagcatgatgttttgcagaacggttttgtgcgggtacagatgaaaatgctggaacaccatgccgatattgcggcggaccttatttatatccgttttcttgtcatggatggagacgccgtttaccgttaaggcgcctccatcaactgtttccagctgattaatgcagcggagaagcgtgctttttcccgatcctgaaggtccgatgataacgacgacttccccttttttaatgtgcagattaatgtttttcagcacgtggaaatgtccgtagtgcttatttacatcctgaaatgaaatcatggccatcctccttaaaaaacatgagtcatattgactggacagtttttgaaatcctttaacacattacgatggttatacagatttttatgaatattatttagattatttcgtaatttctgataattatttccgtcaagaggtctgcgtcataaggcggagtttatgaaacgggaataattccggctttctgtcaaaagataaagcaagaggtgaaacgtcatgcttcaaaaaccgctgcagctcttaatgtggacggctgtatgtctgctcgttttgttaacagtgtatgtcttttgcatgctcgatatgttatggtctcccatttggcttgttataaaatctctctttattcctatatttatcgcagtatttattgcttatcttttacttccgattactgaatggcttcatagaaaagggatgcctagaactttaagcctgcttctgatttattgcctgtttttcggcggaatcggctggggggtttataaaggggttcctgttttaattgaacagctgcaggatctgtctgagagcattcccggtcttgccaaaaactacaacagcatgctgaagcatctgcataatcacacggatcattggcctgacggcatgcaccatcgaatggacaaaatgattcagcagacagaaacgtttcttgccggcacgattgaaagcacgatcagaagcatccgtttcgtgcttgattatatcctgatcgcggcgacgattccttttctcgtgttctatatggtgaaggatatagacgtcatgaaaaagacagtctggtatttgacgccgaagtcctggagaaaaagggggagtgaatttctgcgggatgtagacgactctctcggtgattacatccgcggtcagcttctcgtttgttttttgctcgggctaatagccggcgtttcattttggctgttcgggcttccttacccgctgattttgggccttgccatcgggattacgaatgtcatcccgtatttcggtccgtttatcggcgctgtaccggcgttgctccttgcgctggcgatttctgctaaagctgtgatcatcgtaatcgtcacgatttttattctgcaatttatagaaggaaacattttgagcccgcttattgtcgggcgcagtctcagaatgcaccccgtcgtgatcatgctggcgctccttgccggaggagagctcgcgggcattcccggcatgattctcgctgttccggcggcagccgttttaaaagtgacggccatacactttttgcggatcaggacggaacattgacattcgggttctgcttgtctataatttcgagtagaatacatacgaatctcgagtgacggatatgagtacgccgaagccctgtttaagagagaagctccgatacgctgaaaggagcttcagcagaagatcggccgaagctaatcctgagtgcagttaaaggctgccgcagtcctgcgttacgggatgaaaggtgacaggcctttttcggcctgtaatcagggtggtaccgcgagacagctctcgtccctgtgtgaacgcatggtttgcatagggagagagcttttttgctgtcgcaaaagagaatttcgggtagtgataaggaggaatatagatgaaacacttaacttctgctgaagtgcgtcaaatgtttttagatttctttaaagaaaaaggccatgccgttgaaccgagcgcctcattggttccgcatgaagatccgtctttattatggatcaacagcggcgttgcgacgctgaaaaaatactttgacggccgcgttgtgccggagaatccgagaattgtaaacgcgcaaaaatcaatccgaacaaatgatattgaaaatgtggggaaaacggcgcgccaccacacgttctttgagatgctcggaaacttttccatcggtgattattttaaagaagaagcgatcacgtgggcatgggagtttttaacgagcgaaatgtggatcggctttgatccggagctgctgtctgtaacggttcaccctgaggatgaagaagcttatacgctatgggcggaaaaaatcggcgttccggaagaaagaatcatccgtctggaagggaacttctgggatatcggcgaaggcccgagcggaccgaatacggaaattttctatgaccgcggcgagaaatacggcaatgacccgtcagattctgaattgtatccgggcggcgaaaatgatcgttatcttgaagtatggaacctggtattctcagagttcaaccacaacccggacggcacgtacacaccgcttccgaagaaaaacattgatacgggcatggggcttgaacggatggtctccgtgattcaggatgtcccgacaaactttgacactgatttgtttatgccgattattgaagcaacagagcgcatttccggagatgcttacggaaaggacgcagtgaaggatacggcctttaaagtgatcgccgatcatatcagaacggtcgcatttgcggtaagcgacggggcgctgccttcgaacgaagggcgcgggtatgtactgagacgcctcttgcgccgggcagtgcgatacgcgaaaaccatcggtatcagccgtccgtttatgtacgagctagtaccgactgttgcaggaattatggacgctttctatccggaggtgaaagaaaagcaagagtttatcgccaaagtcatcaaaacggaggaagagcgcttccacgaaacattaaacgaaggtctggccattttatccgacgtgataaagaaagagaaggaaaaaggcagcggcatcatctccggaaaagacgtattcaaactgtacgatacgtacggattcccggttgaattgacggaggaatacgcggaagatgagcaaatgacggttgaccataaaggctttgaagccgaaatggaaaaacagcgtgaacgggcgagaaatgcgcgccaagatgtaggaagcatgcaggttcagggcggcgcgttgcgcgacattaccgcagaaagcacatttgtcggctacagtgccgtaaaagctgaagcgaaggtgatcgagcttcttcatgacgggcaattaatcagcgaggcgcatgaaggggataccgtccaaatccttcttgacaaaacgcctttctatgctgaaagcggcggacagatcggtgacagaggagtgctgagaagcgagcaggctgtcgtaaccattaaagacgtgaaaaaagctccgaacggtcagcatgtacacgaaggcacggtggatagcggcacgattcaaaaaggcgcaagcgtgacggctgaagttgaagatcaaatgagaagcggcgtggtgaaaaaccatacggctacccaccttctgcaccaggcgctgaaagacgttctcggcacacatgtcaaccaagcgggttcactcgttaccgaaaaccgtctgcgttttgacttctctcatttcggtcaagtgacgaaagaagaacttgaacgcattgaaggaatcgtcaacgaaaaaatctgggagagcattccggtagcgattgatttgaaaccgatcaatgaagcgaaagaaatgggcgcgatggccctgttcggcgagaaatacggcgatatcgtccgcgtcgtacaagtcggagattacagccttgagctttgcggcggatgccatgtcacgaatacggctgaaatcggcctgtttaaaatcgtatccgaatcagggatcggcgcagggacacgaagaattgaagccgtaacaggaaaaggcgcttatcaggaaatgaacagccagctcagccttctgcagcatgctgcggacgagctgaaatcaaacgtaaaagacgtaccgaagcgaattcagtctcttcaagcggagctgaaggaagcgcaaagagaaaatgaatcattgctcagcaaactcggcaatgtggaagccggagccattctgtctaaagtaaaagacatcggcggcgtaaaagtgctggctgaaaaagtaaatgcgaaagacatgaaccaccttcgcactatggtggatgatctgaaagcgaagctcggttctgcggtcatcattctcggcgccgtgcaaaatgagaaagtcaacctttcagcaggcgtgacgaaagacctgatcgaaaaaggccttcatgccggcaaaatggtcaaacaagcggctgaagtctgcggaggcggaggcggaggccgtccggacatggcacaggccggcggaaagcagcctgaaaaattggaagaggcgctcgcatctgcggtagattggataaaatccgttttataatcctttcaagtagtgtagaatgatgataagatgaggacctcaggctgaactttgcctgcgaatttgggaaagaggtgcaaaacggtgagctcgtttgataaaacgatgaaatttaatttctccgatgattctgctgaaacaaacgtcgaagaagtgctgaatacggtatatgatgcgcttcaggaaaaggggtacaatcctatcaaccagattgtcggatacttgctgtctggagatcctgcatacattcctaggcatcgcgacgcccggaacttaattcgcaaactggaacgtgacgaattaattgaggaattggtaaaatcctatctagaacagcataaagaggcgtaaatacattcatgagaatattgggacttgatcttggaacgaaaacactcggcgtagctttaagcgatgaaatgggctggaccgctcaaggcattgagacgataaaaataaacgaggctgaaggagattacggtctggaccgtttatccgagctgatgaaagactataatgtagagaagatcgtgctcggttttccgaaaaacatgaacgggacgatcggtccgagaggcgaagccagccaaacatttgcgaaactgcttgaaacagcgtacaatgtccctgttgtgctgtgggacgagcgtctgacgacgatggcggctgaaaaaatgctgatcgcggctgacgtcagcaggcaaaaacgaaaaaaagtcattgataaaatggcggctgtcatgatccttcaaggatatctggacagtttaaactaagaggtgaaaaaaatggaacacggcgaaaaacacattacaattgtcgatgatcaaggcaacgaacagctttgcgaagtgctgttcacatttgaaaacgacacattcaacaaatcttacgtactttattatccgattgatgctcaagacgatgatgaaatcgaaattcacgcttcaagcttcgaaccgaacgaaaatggtgaagacggcgaactgatgccgattgaaaccgatgaagagtgggaaatgatcgaagaaacgctgaacacgtttttagcggaagaagacgaagaataaaatgaacggaaaaagccggagcgcatatgcgcttcggcttttttttgtaataaattgccgaatgcacatgaatcatgtagtataagagctgttgggaggaaaatacttgtatgaatatcaatcagactaaacattcatttccgcgtaaaaacaaaaaaatgacgataatactgtcctccgtgatcgctctgcttatcatcatttgcggtgcttttttctatggaaaatctctgctgtctccggttgacaaaggcagcaaaacggcagtcaatattaatattccgagcggttcttccgtttcggcaatcgctgaaattcttgaggatcagcatgtcatcaaaagcaaaaaagcatttcagctgtatgtgaagtataaaggcgcttccggatttcaggcgggattttaccacctgaataaaggaatggatgcggatgcgattatcaaaaaactgaccgcgggatcaacgggatatgcttttcagatctccgttcctgaaggaaaacagcttacgcagattgcggatgcgatcgcaaaagaaacatcatattcaaaagaagagatcatggcgaaactggatgacaaaacattcatcggcaaactgaagaaacagtttcctgatacgataacggacgcgctttcaaacaagaagctcaagcatccgctagaaggctatctgtatccggccacatatccttttaatgatccggatgcatcgcttgacacgattttgacggcaatggttcaggaaacaaacacccgtatcgaaacatataaatctgaactggaaaaaaagaaactttccgtccataacgcgctgacaatggcatcgcttattgaagaagaagccaccgccaaagccgaccgtcacaaaatcgccagcgttttttacaacaggctcgaagaaaaaatgccgctgcagactgacccgacggtattatatgcggccggtaagcataaaagccgggtctactacaaagacctgaaaattgattctccgtttaatacgtataaacataaggggctgccgccgggaccgattgcaaatgccggtgattcatcatgggaagcggctctccgccctgacaaaacggattatctctatttccttgcaaaatcaaacggcgaggttgttttcaccaaaacattaaaagaccataataaagcgaaggaaaagtatatttccaaaaaagacagcgaataaaaggagggcaaaagctctccttttattccattctgaaaggttttatgataaaatatatcgggttgtttacttatggataaagaagtgtcttaagagagtgtccccgcggattcgtcaggggcactcctttttagaacggaggctgtttgccgtgaatgatcggtatgaacaaataaacgagtatataaacgcgatgctgaagcctcggcctgataaagtgaaaaagcttgaagcctatgcaaaagagcaccatgttccgattatggaagaagcgggcattgaagtgctgcttcaaatgctgtcgattcaacaggcgaaaaacattttggaaatcggcgcggcaatcggatattccgccatacggatggcgcttgagcttccggatgcgaatatttacacgattgaacgggacgacaaacgctatgaagaagctgtgaacaatataaaagactttgaaatggaaaaccggattcacgtagtgcacggggatgcgctggaactttctgagtctgtccgtgtcacggctccttatgatgccatttttatcgacgcggccaaaggccagtacacgaacttttttgagctctatgaaccgatgcttgcgccggatggagtcatttttacggacaatgttctgtttaaagggctggtggcgcaaaatcactcggacattgagccgaaaagaagacggaagcttgttgaaaaaattgatcaatataaccaatggctgatggaccggcctgactatcaaacggtcatactgccggtcggagacggcatcgccatcagtaaaaagaagaggtgaaggatcatgaaaaaacctgaacttttggtgactccgacttctgtacaggatattcttccgctcattcaagcgggcgcaacggccctgttagtcggagaacagagatacggcctgagactggccggtgaattttcaagagaagatataaaagaagccgtaaagacagctcatcaggaaggcgcgaaagtgtacgctgccgtcaatgctatttttcacaacgaaaaagtggacgagctgaacggctatcttgcctttttgcaggaggccggcgttgatgcggctgttttcggtgatccggccgttttaatggcggcgcgtgaagcggctcccgagcttaaactgcattggagcacggaaacaacgggaaccaactactattcctgcaattactggggacgcaaaggcgcacggcgggcagtgctggctaaggaattaaatatggacagcatcattgacataaaagaaaacgccgaagtggaaattgaaattcaaatccatggcatgacgtgcatgttccaatcgaagcgttctttagtgggccattacttcgaatatcaaggtaaagtcatggacatcgaacagaagaaaaaagaagcggggatgtttctgcatgacaaggaacgtggcaataaatacccgatttttgaagatgaaaacggcacgcacatcatgagcccgaacgatgtgtgcatgattgatgaattagaggacctgatggacgccggcatcgattctttcaaaatcgacggagttttgaagtctcctgaatacttaactgaagtgacccgcatgtacagagaagcaatcgatttgtgcttcgaaagccgagagacatacgaagagaaaaaagagagctggatagagcggattgaaagcattcagcctgtgaacagaagcatcgacacaggattcttctttaaagaaacggtctattaaaaaggagggtgcaacggatgacagccgtaaatcaaaccatttccaaagtcgtaaacggaaaacgcgtcattacgaaaaaacctgaactccttgctccggcaggaaaccttgaaaaattaaaaattgccgttcattacggagcggacgcggtttttatcggaggacaggaatacggactccgctcaaatgcggataacttctcaatagaagaaatcgcagagggcgtagaatttgccaaaaaatacggggcaaaaatatatgtgacaacaaacattttcgcccataatgaaaatatggacggtctggaagaatacttaaaagcgttgggagacgcaaaagttgccggaattatcgtcgctgatccgctgattattgaaacatgccggagagtggccccggacgtagaaattcacctcagcacacagcagtccctttccaactggaaagcggtgcagttctggaaagaagaagggcttgaccgcgtagtgcttgcccgtgaaacgagcggactggaaattaaagaaatgaaggaaaaggtggatattgaaattgaaacctttatccacggcgccatgtgtatcgcttattcaggccgatgcgtgctgagcaatcacatgacggcccgggattctaaccgcggcggctgctgtcagtcctgccgctgggattatgacctgtatcagacagacggtgcaaacgcggtcgcgctctacgacgaagaagacgctccgtttgcgatgagcccgaaagatttaaaattgattgaatccatcccgcaaatgatcgagatgggcatcgacagcctgaaaattgaaggccggatgaaatcgattcattacgttgcgacggttgtcagcgtgtatcgcaaagtcatcgacgcatactgcgctgatcctgaaaactttgtcattcaaaaagaatggctggatgagctggacaaatgtgcaaaccgggataccgcgcctgctttctttgaaggcacgcccgggtatgaagagcagatgttcggtgaacacggaaagaaaacaacatttgattttgccggtctcgtgctcgcgtataacgaggaaactcaaatggtgacgctccagcagcgcaatttctttaaacaaggtgacgaagtggaatttttcggtcctgaaatcgacaatttcacattcacaatcggcactatttgggacgaagacggaaacgagcttgatgctgcccgccatcccctgcaaatcgttacatttaaagtagacaaaaagatttatccgagcaacatgatgagaaaggggaagtaatcaccaatgggtaagagtcctgtagttataggcatcgcaggaggttccggatcaggaaaaacaagcgtcacccgttccatctatgaacagtttaaaggacactcgattttaatgatccagcaagacctttattataaagaccaaagccatcttccgtttgaagaaaggctgaacacaaactatgatcacccgctcgcatttgataatgactatttaatcgagcatattcaagagcttttgaattaccggccgatagaaaagccgatttatgattataaactgcatacgcgttctgaggaaaccattccggttgagccgaaggatgtcattattctggaaggcattctcgttctcgaagataaaagacttcgcgacctcatggatatgaaactttatgtcgacacggacgcggatctccgtatcatcagacggattatgagagatattaacgaaagaggccgttcaatcgattctgtcattgagcagtatgtgtccgtcgtcagaccgatgcacaatcagtttgttgaaccgacgaaacgctacgcggacatcattattccggaaggcggacaaaaccacgtcgcgattgatctgatggtcacgaagattcaaacgatccttgaacaaagcttgatataaaagggttgtgggcatgcgtatcagctttataaaatgcgcatgcccacaatttgcccacgtttttttaaaagatttcattcgccatagcgttaaattggacgatagatgcagtttttttatctttcatgatatgcgaataaatgtcgagcgttgtttttgcagaggaatgtcctaggcgtctttgagcttctttaatatcaatcccagcatcaatcatcaaagctgtatatgtgtgtcttaaattatgcggagtgatttttttcactcctgctttttttatataagtggccattcgataattgaagtttcttgccggttcgggctgacctgtatgatcagcgaaaacaaagtcttcatcaacgtaattgcctcgtttctcctcttttattcgttcttgtacatgcttcaaaacacgtaattgattaatgacttgaggcggaaccggtacgttacggatagatgattgagttttaggcggcatcattttatatttccctcttaacccattcttttggaacaaagtgaatctgacccggataatagactcttcaaagtcaattttgtcccatttgagggccacagcttcgcctatacgcaaaccggaatacaccagtagcaaaaacatcgctaaatcttgaggcctccctttccgttttacagcgttcagatatgctgttatctcctccttttcccaaaattttatatctgcaagatcttcatcaacttgttttgaagaggtgtcttttgtggttttaggaattttcacttctttaattgggttatatctgaagtaggagtctttaacagcttgatccataaccatcttaattacgtgatgaaccccaataagtgtgttctttgcatattgcggcgctatatcattcagaaaattacggtatattttttcattgacgctctttaatttataagcccctaagtgcttctttaaaatgattaaactatcatgtcttgttttccaagagctttctttgacggtgggcttataatcttcaaaccatttatcaaggtaagtggccagtctaatattatcatccttttcaaaaaaatcttgatcaatgttgatttcagcttgagcggctgcaaccatagcttcttttttagtcctgaagcctttctttgttttttcgcgtcttttgttcgtgatgggatcatagtatgtaattctgtattcccaattgtctccgcgttttctataactcgccattgatcctatcctccatttttacttaaattcactttattaatattattatgcaactcaatcggatatttttgtagagtaaagttattttcactcgtgattagttcaattaaattaaaagcttgttgccatgtgataacctgtaaaaattcttactgaatatataactttagtaagaattatggtataatagagaaaaatatgaatattattcttattcgaaattatcgttctttttttgatgctttcgtcaattatcgacaatgtttttcttctggacgtgatatattaatttgaagtggtgattaatatgaataaatataaatttgatgttagagggcatttgaagaatataattgagtcaaaggaagaaccgcaaaaacaaattgctgataaaattggaatcagcgcttcgcatctcagtaaattccttaatgggcaagaaatcgccttgtggatggtactggaaatcgttcgctatcttgataaggataatgaaattgaaataatgcgccagtgctgctatgaagcaacaaaaaagaatataaaaactgcatttgaatatgcacactcaaaaaaactcgattcgatgactactcatttgataggggaaacaattaatggtagcaatcgagagctgagggaatgggctttagtttatggctggcagcttgagtcaaagtattcccgtgtctatagtgaagttgaatatcttgagaagttaaaaccattgaagcctagttcacaagatttaaaaaccctcttgttaattttagaaatgctatgtttttattatagtggaaaatttgatctttctttgcattatgtcgagaagattcacgatatgctgccagaaataaaagacccttttattcaaaaggcatttttaagtaggacggatgaagctcttgctaacatgtatcttaaatttagaaataataaagaacaggcccgggaaagagccgcgaaattaatcgaaagaaacttcagtgtgaattcagtaacaaatggatttttcatttcagggttatcgtacttctatgagtcttatgacaatgcagcttattattttaaaagagggatagaacttaataactctcgagataggtattttgttgccaatgatctaagagagcaactggcgattttaaacatgttttgggaaagacctgtgtcaaaaaagcttatcgtatctgaattcataaaaaatgtagttagacagaataacttggaacaatattatgattatgaggtatactctgcattagctttttactttgatggaaagaaagagaagagcatagagaaattgctcctctcattacatatattctgtgataaaaaagactacttcagagcaaatttaccaaaaatagagttgctaaaattgggggttgattataatattataaagagggaggtgaatattagtgaaaaagactgtcatagggatagcaataacattagtgatagtattagcctttgcttttagtacagcaaattctaatactgaacacaatgaaccacaacctttgcagaatcctggaaacaccaaacagttagctgatccaccggtgggcatgagttacaaagttgtagagccgaaaatcacaaaaactgaaaaaactatattttattaaaaaagacgctgccaaaattataggcatcgtctttcgtgtttttaagaaggatttcctgttttcaaaaaatgaaaaacaggaaatccttagttgccgatttatttttaatcatcaatgcattataatagaacaaaagttcgcataaaggggattgcataaaatgaagacagatatttcactcgatgaatttttggagaaaataaagcaattagccgaccaagaatcaatcagtatcagaactgccctttgattttctgtatgcttttaggacttctaacatcacatttatttcgtcgtcggaaacttctttgccatcaagagttatattataatttttcctaaggttttcaattgacaagtctttttcaaacgctaattgtttttcttcttccgagaaatgttctatattatctaagtctgtaaaaaaataagagcgatcaacagaaaaaaagtctgcaattatatccagctttttcattgaggggtcttgcaatcctctttcgagtttggatagatagcttttagagatacctattgcttcagcggcttcaactaatccaagaccttttttttcacgcaagatttttatattttttcctatgtttttattcaaaaaatcaccttatttctcccgtttattaacgtataatcactatagtcattataccatcgagagttgacaaataatacacaaaaaactataaagggggttgcaaaggagaaaacaagatgttatattttatttagtttcctgacgggaaaccaagagagaggtgaagaaaatgaatttctctaaatttagaagtaagattaaaagcatcagaggtgaacagactgtaagggagtttgcttctcatttgggtttttctccatctttcatatctaaaatcgaaaatgggaaagttaatccaagtcttaatagcattgaaaaaatttctaaaaagctcgacattccaatgagcgattttttttgaaatcaggtttcctgaaaggaaactagaggaggtataaacattgaaaatcgaacttgaacaatcagatatcgacacaattacaagcgaagtaatcacaaatgtcagcgcagcgctggttcctaaaattcaagaaatgatcatggtactgtctgcacaggatcagttgctaacaaagaaggaggtttacgaagggatacttaaatgtactgctgctaccgcggaagagttgtatttcagtaggccggactttccttcgtttgaaccacctcagcgcccaggcggggcaaaaacccagcgaagattttcgcgacgtgctgttgaggcttggatcgcaaagaactgcatttcgaacgcataaggagggggagcaaatggctaatttccgacaagtttatgtggaattttggcaagacccaaaagtattagaagaattaacaccggaggataaatacttttatttgtatcttttaactaacccaaacaccacccaaataggtgtttaccgtattaccaaaaagcgaatggcttttgatatggggtattcacccgaatcagtaaacagtcttttggaccggtttcaacatcatcataagttagtcgtttataactcagaaaccagagaaatagcgattatcaaatggggaaaatacaacctcaagaaagccggaaagcccatgatggactgcatcgaaaaagagttaaaacagatcgaggataaaacattgcttgaattgatttttcctcacattcctaatgacgttatcagagaagcattttcacgttacgtgaacgatacgtacgacgatacgtcgtcgtgtagtggacaagaaaaagaaaaagaagaagaagaagaaaaagaattaaaagatatattgtcgggtaaacccgacgacgcatcttcttccaaaaacgaaaaggacgagattccttacaaactgatcattgatttgctgaacaaagtagcaggtacacgataccgatctaacacagagaaaacaaaaaaagacatcaaagcacgctggaacgaaggttttcgttttgaagattttaaacatgtcattcttgtaaaaacagaggaatggctcaatgatcctgctatgaataagtttctacgtcctcaaacattgttcggtacaaaatttgaatcttacctaaaccaaaaaggaggatcggcgcatggaggattttacaaaggagcgagcagccgcagtccagggcgaaatatctcgcaggatgacattccatactgatgagcacggtaaccctgtttactgcgacaaacacacccggataatcggcggagaggaaaaaccgtatccagttcagctcatggaacttcgggacggctctgtaaagtgtcctatgtgcgaaagggaacagcgcaacaaggagattgagcaagaagctgaggtttggcgccgtcaggtagagagaagggttctttctacacactcactcattgccgatccaactctggaaaaggcaacgtttgaaacatatcactgttacaaccaagaggatgaacagaacaaacgccggatgcttgaactggttgatcagatcaaagcgggcgtaatcatgaacatatttataaccggtgcgtccaatgccggcaaaagtcatctggcaatatcagcgcttaaagaactgaacaaaaagagtcaagaagcatatgcaaaatcagccctttttgttaatagtgacgcgctcatgcggcgcataaaaaattctttcaacgatgattctgaaaagcttacggagtccaaggcaatcgaactgcttacacgagtcgattacctcgtcatcgacgacttggggagcgaagtgggcgacacagataacgagaaaaggacagcacctgatttcattcagagggtttggtatgggatatctactggcaggcaaggcaaggtgacgattgtgacaactaatcttaccggaattgctttagcaaagctttatgacaaaaagaccgtcaaccgccttacagcccatcttgaacaaattgagtttgaagaggcgcaaaaaggcaaagggcgcaagacaccggcttcgctggtttaaggaggtgaaaacagttgatacaggcaatcatgcccggcgtgctgcagatcgtcccggaacgcaaattaacggatgaacagcgcaaaaaagaaatagacgagcttatcaaggttcttgatcaaaaaatagcagactatcagaactttagggggaatgcagtgtgaaacgtggtaaatgtccgacgcgtgcgcaaaaagcaatcattaaggcaaacggcctgaccattgaaaactggctcgtcttggagcatctacagcacgagcatcgtctcatattggttcaccgctatatgaattacaaaagggagtgtttagcatgagtcaggcggtcaatgccgaacggttcgaactggctttggaggatatgaattatgaatggtcaatggtccagctgaaaaaggtcgttcaatactggcatgatgggaaatcaattcttgatatgtcggaattattaaacagggattcggatgaaatcattttgctggtcatggactttgcaagaaaaaacatcctgcccgcccgtaagaacggtttacgcgctaacaaaagaattagaatatccgagaaaacgatgaaagataaaatgtaccgactacgctatttgtttgaagaaagcccggtgtatatcccttttcaggagctaaacttcatgttttatgacagtgaaatcaggcgtttccgggagctgtgggcggcagatgagtcttatctcaacatagcaaaagagctgaaacggaatgaagacgaaacgttattccttatcatcgaccaggcaaaaaaagaccttattgagcctcgggaatccggcttactcggaaaggaagcgtcagaagatgaacgcaacaaacaaaagcttccattttgaaaaagcaacggtccagcaacttatggtcatcgtgcgttatgaagactgtaccccggaggtacggaacgcggctttacaaatgttgatgatgaagggagcggaagaggtttgggacaggcagaacgaaagcatttaatggaatggcttttgcttatcggctcttatggcagagattttttaaaccgtcagacagatgaagagcttgagcgcttatataatcttcaaatcaaaggcatgaacaaagaataggaggacagcaccatgacagaaaacaaaaacttgcgtcgtcacggtgaagttataacacgggtgatgagcgaagaagaacgccttgagtatataaaaaaacacccaatcattccgacggaaaaaccaaaggctggcatacagctattcccgtcaaactattggatgtaaggacggccgctaaagcaaccgccaccgtatgataaataaaacttcgacacttttattatatcatacggaggctttgaacatgcagccaaaacatatatcaatcaatcaaaatacaagtgtttctcaatttattgagccggggaaggtgtctgtcatcgtgttagacggcaaccaaaacgccgcatatgtcgttgaggcacccgaacatggtaaaacaatcattcaaacagtaaaaggcggcctggctcgttgtgattacgagatcggccacaaattcaaatagcaggggtttcccctgcgggggaggaacggaaaatgattcaaaacgaaattgcccgtaagtgtgaacgttgcggaaaaatatattattcagctcaatgggttgtatgcaaaacatgtcttttagaccgggaggcccgggcatgaaagaattcaaaatcaatttgtcaaaaggtgaggttttatataccggctcttacatttgcgccctttcaaaaacaccagccagtacacctgagcaaatttctttagaagcagcagctgaaaagctcgcggaagagttaatcatgcagcaggctatgaatcgggagcatcagcggcagcaggatattgcggccaatcaattccggcaggcacagaaagatattaagttgctgcaggcagagaacaagcgttatagaaacgcattagaattttacgccaatgaaacgacgtatacaaacgaatttgaagactgtccgccagctgtcgaactcgacggaggacaaacggcaagaaaagcattggagggggctgcggaatgagcggattatcacaagaacaaattaacaaaaatttatttgacgaagtccagcggctcaaaaagaaatctaggcatgacgaggaagaaattcgactgctaagggcggagaacaaaaaattaagatcggaaattgaagaactggaacagataacaagagatttcgaatctgcaaatagcgatttggaagataaaatctggggattggagaatgacgcggaatgaaagtgaaacatgttgatcaaggtggtttgaaaagtaactggcgggaatttgttgattttgtaaaatccaatggctttgacatttgggaagattatttctttgtctttcatgagaatgaatgtgatgaggcttatatttttgacgggaatacagaattagatgaatggttagaacgggaattttgggatggttgccattacgagaatagcgaccttgaagactcaatgaatgaatggaaagtctggagacttgtttcggcttctgatgtcgagagttatcctagccttcacaagaaatcaaagaaaacttcgattgttattgatggtgagacactttatagagaaccggtattcataagcgtcgagcagacaatttcagtatcggcttcagccgtgtaagggggaagtagaatgatgccattacaagtagaactgcaacggaacgtgaaggccacgaaggacgaagcaatgaccgtcgaacaggcggccgagcttttaaaggttcacccggactacatcccgacgcttgtcgctcggtctgacgatctgaaaatgatcggcgataccattatcgctaaacgggataaaacaaatatctggctggtcggggcatgcgtggggcttttcttcttcgctgtttctgtcctgccgaatttgatcgggggttaagggatggcaacagcagagcaattgaaacgattgaacgacataaacgatttgatcaagcttatcgcaagcattgatagatgtactttctactgtaagtcaaagaatcggatagcgtatttcaggtttaagaaaaaattgttcttcgttgatgattacacgggggatgatgtttacccgtatgaattgggatacggtcgtgcaaacggcttttcgcatgggggcaacatgtggcaactggtgaacagctttagaaaattcatcataacagggaaaagcggcgagctgagagattataaagaaatatgggcttacagctatgaaggatgtatgaaaatccgtcagaaggcgaaggagatcggtttcattgaaagcgttgattacgcctacagctttggtgaatgggcggatagtaaatgatcgaataccattgcccggactgcgattataaaaaacttgatttagaaatccgcgcagatgcacgctgcccgcattgtgggcgcgtcatgggcgctgaggaggaaatagcgtgaaagataaaagagaaattgaccgattgattgctgaaaaggtgatggggtggcagactcaaacgtttcccaacatcgctgttacatctgcctacacagaggatggagaattgaccattccggagcaattttctccgactaaaaaccttgatcaagcttggtcggtagtggagaaattcaaacttgtgaaaattgaaagagattcaaatagatgtaacgcaccatacctcgcagtaataccgacagagacacaagttttcacagctattgccgaaacgcctcagatggcaatttgtatagtggctttagaggcctgcggcaccgaggtaaaacagtgaaacaggattacaggcaggctttcgaacaagcattggctgtcttccgtgaaaagcacggaccggaaacaggcggcatgctgcttatgtgtcatgtgcatgaatttctacaaaataccgtcggcgggcggaaataagggagcggtacaaatgggattagatattagagtgtttaaaaatttgaaggttgttgaaaatcctcagctggatgaatacggcgacattaaaaattgggaaacggaatggacaccgggtgagagcatgaaatggtcggaagagcactttcccggtcgtggcgaaggtgttgacccagacaaattttatacatgggaagagagtttcagcttccgtgcggggagttacagcggatacggctggtggcgtcggaaattagaagaattcaagggagacaccgcctttcaggagttaatcaattttgcagataacgagggcacgataggccctgtcgtttctaaaaagctggcaaaagacttcaacgaacacgccgatgcggctcgcgaatacgccagaacattaggcgatgcaggggaagtgtggctctacttgtatgatgattggaaaaaagcttttgaaatggcatctgaaaacggagccgtgaacttttattaaaaaatatatcccaccagctggtggaagtagggggaaccgaaatgaaaatagggagcatctcatcaacggaaagtaaaccatgtgcattgtgcaatagaaaaactagcacatataaaatctatgaacagtccaacatagccataaaaattcctctgtgcgatacagaagagagaaaatgtttccgcgtaacagatgtgaaagacatagctactctcgctttgaaaatgatcaaaaaagttataccgggggcagcggaatgaaccacaccgacaacccgatcatttcagccgtcatcagcaaactaaacgcacaacaggaaaaggggcttgccaagtacggccagcccgtccaagttaatgcctatgatctgcgcggctggttgcagcacgcacttgaagaaactcttgaccaggcagtctatctggaagcggctatccaaacgctgtacgacaatcaaaatatcaaagaagtcatcaaagggttcaatgaaatggaagcaggtagggaagacatcaagagactaaatcgtccctgtcattacgacggttgggaccatgcaatgtcacattttaaacagattctcaaatcagctcaattattgaagggggaagaacaatgaaattctatgaaatccatgatccatattacgcgcttctcaaagcggaagacaaggcggaagccgagaaaatttacattcaggaagtcgccaatacggacgattacgacaattttcaagatgaagaaatcaatgaggtaagccgtgattatgcccttagcgaatacaaaagagtgatgaaaaaagaaggcgaaaccgatcatgatctgattatggaaacgtttaatgttccggcgagtgaaatgcttgtttgggacggttcactagcatgaacacagcatacagagtgtgggacggcgagaatatgcattattgggatgatgaggggttaagccttgaactcaaaggggacaattggattttatggcgtgatggttgcagagttattgttgcggaaagttatgacagaaattccgttctcatgtggggaactgggttgaaggataagaacgacggagacgtataccaaaaggatattactgaggaatcgtatgtgaatcctttactcaaagaaaatgttattgaccgttatgttattgagagacggaaaggtatcgacagaatgaaccatgtcagcaagaagagccaattggataggttcttatggtatcgacttgatgaaatcgaggttgtcggaaacgtttttgaaaatcctgagttgttggagggcgcggagtgatggcatacaaagataaatcaattcaacttttcaatctgtttgatgaattgagcgaacaggtgaacaatgtcatgcatgacgcggtgattttcaaaaaacgaaacagactcaatgtgatagatcaaggtgcaaaagaggccgagcggctcacgaaagaaattcaaaagcttgtgaattcgatgcggcggaagaaggtggacacggaatgccaaaagtgaatgagatattaatccgatattattgcgacgactgcgaggaatggacattcttagaaaggccttccagcacgtccgaaatttattgccctttttgtggagaacaaactcttgcgatagattctgatgatttaagtttactggaagaggcgatgaaggagggcgcggaacaatgacagaaaacgaagagctacaagcaagatgcatcgaattggaaacgcgtaacgaagatttagcgcgaacgattcaggaacaaaacaaaatgatccgggggcaaaactggcgaatcatgtttttcgccctctcttgggtcctatatggcgctgtgagtgctgtgaattacttttgggggtgacggaatgaacgaatacaccgaatgcccggaatgcgggaacgaccagattattgattatggagaaatggcggttgagtatgaaacgtcagttaaaacagggaagctgttgaaacggaataaagaagggcattcaatatggtgcgcgcaaaagtgccgttgcggttgggatagttattcagaaaaatatgagtgaggagggcgcggaatgaaatttaaaagctttgacatacatcgtaaagaacaatgggatttaaacaacattaagccgctgatatgcatacacaaagaatatgatagcggttgcggaagtaaaagggttctgtgcataggattcgataaacgtaaacctgtgtttgtttttgctaatccgtttaaatacagatattagaaaagggtgggaaataatgaaaaaactattcaaatcaatcattctatcagcagcattacttacgggagcggcggccgttgcgccgtctgcttccgcagcatggtccggctggcaaaacgaatccgggtacagcgggcgagtgtttacggatgccgcgacttacacggcccgcgcctctacggtggactggaaagccgagaaaaaaggatcaaggacactttattacacggccggcgtatacaagaagcgcagcggcggcgggctgactgatacgaatctggtacagcggggcagcttcaaaacggcaacgcctctgaaatcattcaacgtgaaaacgatccggaataagaccggaaagggaacctatgtcatccagctggactgctactctgattccagcaagcggaactatatcggaacatttgaatcagctaaattttacgtgaagtaatcaaaaatcaatatgtccaagacggagagcctgcggacactgatcattgcacagaattactgtgctctgattggtgtccgttttttatttgaatgggggaagggcattggaagccaagaaaagtgcactgccgaacgctggttttaagaagaaaaagccaacagcacgcaaaagtaccgaaaaaaagccacagaagcttactgagagagatttaaagaacctaatgggaataaacaggccgacatacaaaagaggccgtggcggagcttttagacagaaataataacgggagggatttttgatgaatcaaatgacactgaacatacctcaaattgacgaagaagcaacgagaatggaagcagaaaagctgctcgaacaatatcgcatgtacttgctacaagtgccggaagattttttgccgaaagtgaccgcaacatatagccttgtccctcccagcttttcgaatgaatttcattcctctacagaagacgcagcattaaaacgcatggattgggagattgaaagagaacggtttttaaagagaatgcaaagagcggttaaccggctttctcaaaaagagcggcaaatccttgtcatgctctacatgcagaatgaagagatgtatgattatgaagtctatgcagaaatgcgaatcagccagcgcagttactaccggacaaaagcaaaagcattttaccggctggcctttgctcttcgtgcagaagtctacaaagacgggggcgacgctgcatgaattttgttcagccgataagggatttagatcagatatattatattaaaaagtacctgaaagaacggagcgaacggaatcaccttctttttgtggccggaattaattcaggtctgcgtatatcagacttgcggcttttaagggttagggacgtgaagcgcatgtatatcgacctgcgggagcaaaagaccagtaaacaaaagcgaatcaaaatcaataaagcattaaggaaggcttttgccgattatatcaaggacaaggatgatcaagaattcttgtttaaaagccgcgaaggactaaataaaccgataagccgcagtatggcatataatattttaagggaagcggctgattatgttggccttgatggtatcgggactcatacaatgagaaaaaccttcggatactggcactataagaaattcaaagacgttgccttgctgcaggagatatttaatcattcaagccctgacattacgctcagatacatcggaattactcaagacaccatggatcaaacaatggatgcattcagcttataagctcatctgtttaaaaaacagacgggctttttttatgccttttcctatgaataaaccatattgagaaaatgtcaaactcattttagagaaatgatttaaacatagtggtggcaaaggattcagcgattcggggaattggacacaatataagttatgattaattgggtatgtggaaaatcttgtccgtttttcgtggtatcattaataagagatgagggaggttgttgcgaagtgaaacattgtccgaagtgcaacccaattactgaaatggagctgctcgttgcacatgaagaaatgacatatagtctttatcgctatgtatgcccagcatgcaaaacgactgacgatgaagcggacctaattagaatcgaacatgataatttgtagattgtgggataaatagaaaaattggaagtttttcgtggtatcatcttttacaggaggtgagcggcatgagtagaggcgcaacaggttcagcgttagaagagaaaggcatggtttgatagaacgataccaagtaatgaaggggtgagcgggatgactgcggcagagcaaaaaggaatgtactaaaaagattttggcagaaagatggcacgataacggcacaccattttgttttagataaggtattatggtagtaggtaataaatcaaaggaagcggcactgctgatgagcggggtcgcttttttatgttctctgtaaactgcgtccggtaaatctcagggagaacaattggcggttaacggcttgagtgcggggacagtttagaaagaatataccaagcgctttcccaatcgggagggcgctttttctattggagggattaaccatgaccgaagataatttatatgtcgatcaatttaaagcgtggcgcactgaacaagagcttcttttgaaacagattaattatgacattgaaatcagtcaaaggaaaatcgaattgaacgagaaacaaaagcagttgcacctgcaacgcgtcaatataggaattcaggagtttaataattgggcagaaacttctaatcgtgacgaaagactggaactattaaagggggatcaaatagatggcatttgacttgaaccttgcacatatgagtatttctgatttgttggaaaaagcagcagaaagcaatgaggtcattcatgtcaaaccaggtcggcaaaggtgtatagggaaaacatctgcactaattgattttgcacgaaaaaacaaagctcctgtccttacgaatcgagcaatggcagatcactataaaaagatccatccagacttaatctttattgggtattgggatggaaaggacctatcagaatatgaaagcattgtgtgtgacgaactcattcctttagaggttgcagaggaattacataaggacggaaaattattaaccggctttgtgaatctaggaaaccatatgagcacccaattttaaggaatagagggataaatcatgaaaccttttagcaaatgcgaacaatgcggagcaaatcacgagatcgaattatttgagtgtaaagaagcaaatagtgtcgttgtggggttcattcaatgcccagcttgccatcataaaacggtttactctgtaacaaatcctcatatcagatctcttctaaagaggataagaacaataagaaaccaatacagaaaagcaaaaagagtaaagaaagctgccagtctccttactgaatatgaaaaggtgaaggcgcagattgaagttcttatgaaaccgttaattgatcaaaagaataaaagcattaatcagtagcgcctttctgctctttggaaaggtgttttatttttttaggaggtcaccatgcaatttgatgaggatttacgcgtgcaagcttataacactgccacaaagcacaatataactacagcaatgatacatgagggtttataccaattgcgtgtctcaggttgcccttggcaggatgctgatgtcgtagaggctttagggtaccttggtgactatggattgcataacctattagcagttgaacgtattgcacgtataagcgaaatgcatccatacagtaaggttaaaggattattgcatcttccatatgagagtttaggggttaaagatagggatgagaaaggggaattcataccaccgaggctattatggaaagagaacttttataacaggaatgagcgaggtggaagggatgccccttaaacctctaaggatatgcgctgctcgcggatgctccagtctcacccgtgaccggtactgtgatacacacaagacacaacaacaggaagaaataaaacattacaacaaacattcaagaaacaaaacaataacaagtttttataaatcaactgaatggaaacgaacaagacaacttgctttgatacgagacaattatctctgtcagcattgtttgaaagatcattgcttcactccggctgacatggtgcatcatatcgtggaagtaaagcaagattggtcgaagagattagacataaataatcttgaaagtttgtgtaatgcctgtcacaacaaagcgcacggcagtaagggctagtgaccatcccccccctaacaaatctcttgaagggaaacgaacggagaacggcgatcccccttctgcaaacaaacaccgcttttcaaagttccggaaacagcagaaagccccctcagcaaatttgccgagagggcttggtacgactggttttgttgttgatttcatcgtaacacgattggcgaaaaaaacaagcgaaaaatgcaacttttttgatacgaaatgaggtgagtacatgccgaggcctgcaaaatccgcgacgcttcaattgatacagggaaacccaaataaaaagaatacggaagagctggcagcccgggctgagcacgagaaaaagatgaaaatgcgatccgataatataaaaccgccaacgtggttggataaagtcgggaaaaaagaattcaaacgagttgctgctttactggctgaggtcgagatcatcacggaagcggacatcagcatgttggccgcctactgcaacgcctactctcagtatatctctatatcaaaagtgattgaagaagacgggattatggttcatacagaaggcaaggatgaagagggcaatcctatcaagttaataggggaagaacaccctttattaaagcggcaaaaaaactattatgatcagatgaaatcggctgctaatgacttcggcctgactccgtctgcccgggcaaagcttgctatcactcgtacacaagaagaacgggagaaaacagctgcagaaaaggagtttaaaaatgtatgaatacaatcaaacagtttctacttgattactcgcgcgatgtgatatcgggtgagattgtggcatgcgaaaaacacatatgggcttgccagcgttttttaaatgatgtgagtagggaaggcacaagggaattcccatatgtgtttgatgacgaaaaagctcgtcggttcctttactggatgacacaatttaaacatacaaaagggccattacagggtgaaaatattgttcctgaacctattcaaattttcatctttggtaatgtgtacggctgggtgcataaggataccggctaccgccgatttaaaaaggtatattggcaggtcggccgtaaaaacaccaaaacccagagcctggcctgtgttggttcctatgagacgatggccaacgatgaatatatggccgaggtatacattggggctacaaaaaccgaacaagcaaaaatctgttggaatgaaattaaggcgcagatcatgcaaagcgaccttttgaacaagccggaaaaaaaatatcggattgcatatgggaaaattgagcaccccaaaacacagtcgaaaattgaggcgctttctaaagatgccgggaagaccggagacgggtttaacccgcaatgcggcatcatagacgaataccatgctcataaaacctcagaaatttatgacgtcctggcctctggtatggccgcccgcgcccagccattaatgttaattattacgacggccggctttgaattaaataatcctgcttatcgtgtggaatatgactacgtgtctcgcatactggacccgaataaggtcgaacagaacgagcaatattttgtaatggtcaatgagcttgataaaggcgatgacgtcaaagatgaaaagaactggattaaagcgaatccgattgtcgctgccaatgagcacggtttgaattatttacgtggggaattggaggtcgcgcttgctgtcccggagaaaatgagaaatttcatgacaaaaaacatgaacatctgggtaaacatgcgagaaaacggctatatggatatgcaggcctggactgactgcggctctgacaaaatgccggatctaaaaaacagggagtgttacgtcggaatcgacttgtcaaaaacaattgacttaactgcagcatcttttgtttttcctttggatgatgggcgggttgctgtggaaagccacggttttatgccggaggatactttttttgagcgaatgaaaaccgacaacgtcccgtatgacacatggaaagataggggatggcttacgacaactgacggcgctgttgttgattatgattacatcagggcttacatcagaaagatggagcaggaaaacggctggcgtatcaaagaaattggatatgatccatacaatgcgacgcagtttgctcagcagatggaggcggacggatatgtaatgattgaaattcgtcagggtgttgctactctatcggaaccgactaaaggcttcagggctaaggtgaaatcgaaaaaagtcattcatccgaaaaattcactgctaacttgggcgatggggaacgcagtaaccaaagtagatgctcaagagaatatcatgctggataaatccaaatcaacacaacggattgatcctgtagccgcattgattaatgcttatgtacgagcttctcaaactgataatgaagtagacctgaactcatatatcaaatcagcgtcattctctttctaagggcggtgtaatcgtgaaaaaaatattcgcattcatgctgcttctgctaaacgattttctttttatcacaggtgcagcatttatagcgtgcgccgcatatcgcttgcatacaaacatcggtcttttgacgacgggtgtcttttttatattttatgcggtgttaattagcaaaaaaagggggtgattgattgtttttggaagggctgttttcaaaaagatcaaatgaatcagagacttggaatcttgcgaaccctcctgactggatcattgatatgttcggcggctcaaagacggccagcggtgaacgtgtgagcgaatcaaccgccttaattcatcctgatgtctattcatgtgtgaatgtattgtctgatgacattgctaagctttcggtccatacgttcaaaagtcgccaaggtgatattatcagcagcatgaaacatcctgttgctcaattactctatttgaaacctaatcgttacatgacggctttcacatggaaaaagctaatgatgattcatgtctgtctttggggaaatgcctactcttatatcaaagtggataaaacaggtaaaatcatagccttattaccgttaaatccagccaatacacaggcctatgtaaatccgaacaacggtctactgtggtatgaaacggtcattaattcaaaaagtgttgaattgtatgcggatgaggtcctgcatttcaagggtatgacagaagacgggattaatgggaaaagtccgataggcgtcataagggaacatatcggtgctcagtctgctgcaaccaaatttaatgcgaaattgtataaaaatgatgctactccccggggaatattgaaagtcccaaccttaattgatgaagacgcaaaaaatcgggctagagatgaatgggaaaaagtcaatgcgggccgcaacatcgcaattattgatgccggtctttcatatgaatcaatttcaatgcctttacaagaagcgcaatttgtggagtcgatgaaattcaacaaagcacaaattgcgtctatctataaagtccctctgcacaaaattaatgaactggatcgggctactttcaacaatattgagcaccagtccattgagtatgtgaaaaatacgctgcatccttggctggtatcctttgaacaggaaatcatcacaaagctttttactgatggtgaaataaatgaaggattttacatcaaattcaatgtaaacagcgagctgcgcggtgatgcaaaatcaagggccgagtattacgaaattatggaacggatcggcgccttaaatatcaatgaaattcgtgcactggaagagaaaaatgcgattgaacacggtgatcggcaccttgtgtcgcttaactataccttccttgactcactggagcagtatcaaatgaacaaagctggctcaagtaaaggaggtgatggcaaacatgagcaaggaagtacgtcatctgacaacgaaaattgagttgcgctctgccggtgaaggcgaagaaaaaaggcattttattgaggggtacgctttgaaattcgaaaaatggtccgagccgttgggaggatggtttaaagaaatcatcagccggaatgccctggattccgcagacctttctaacgtagtcgctctttttaaccaccgtcaggattatcccttagcgagaaataccgtttctgaggacgtagggaggctggagctagaaacagacgcaataggtctcaaattccgttttatccctacagacacgtcatacgcgaaagatttaatggtgaatgttagaagcggagtcgttaatcagtgttcttttgctttttctttggattacagtcaaggagatccggacgaatggcgacataatgatgaagaggacatttatgaacgccgcatcaataatatcgaacgtatctttgacatttctctcgtaacgacgcctgcttatagcgatacggaggcagtgattggtgaacgcagtttagaaaaagtggagcagttaaaagaaatgcggactgccccaattgaaaaattgaaaatggaacttgagcttttagacctcacattgtaggtctatttttatgttcaaatataaggaggatacctgaatgccagtagcaatgacaaaaaaggaacgtgaattaagacaaaaattcacacagaaaaaacaagaggcatccaatcttttggatgaaggaaagtccgaagaagcccgcagcatgcttgatgaagcgaaggcgctgcaaagacaaatcgaactgatgtcagaagaacgcgacttggaactgccggctttggatgaagagcgaaactttgtaccggaacttgaacgaaaacctgatgaggaaccggaacagcgcgacatcttaacagccacaaatgagtaccgggatgcttggtttaaagtgttaaccggacgcagtcatgacctcggagaagaagaaagaagtatgatgcagcgtgttctgaaggaaaatcgctcgttgtcttctggaagtgataaagacggcgggtatactgttccggacgatatttcaaaagagattttgaaatccatcaaggaattaaattccgttcggaatctggttcgcgttgtgcctaaaactgctccatcagggagttatacagtccgaaaaggtgtagccggaaaactctataatacagccgagaaagaacaaattaaagaactaaaaaacatggaatttgaacaaatctggtacaacgttaaaaagttcgccggatttttgcctgtttctagcgagctattaaatgattcttttgtaaactttgttcgtgaaatcgtagactggctctctgaatccgctgtagtgacagaaaatgatgaagtcttttatggaaaaggtggggagacgaatgttgaaggcatcattaccagcggcaaatacaaaacgcttaaagcgccatctgtaattacgattaaatttctacgcaaggttaaaaaccagattaaacgcggatatcgtaaaaatgcaaagtgggttatgaatactgaagcgtttgaaactcttgcaaatattgaagataaaaacggcagaggcatcttagctcaagatcctagggacgaagacagcttccttttgttcggacgtccggttgaggtttatgacgaaattgtaactgacgacaagacacaaaagactcatattcttttcggtgattttgaaagtgcatatttcatgtttgaccgtcaaaaattcgaaatcaaatcaactgacgtaggcggagacgcttttcttacggatcagacatatttccgtggtattgaacgtttcgacggaaaagtagtagatccggaggcagccgtcattgtcactgatcttgtcgtcggggaagacgcaaaggtagaaacgcctgaacagtctgctgatcttggaaaataaaaataaaaattgaaattgaaaggattgatcgacatggcgaaattagacaatattctgaacgaaagtaacggtgtattaacttctgcgagggacaacggtaaaggagtgccgatcactgacatttcggttgctgataacagcgaagaaaatcctctctacgtaaaaggcctaaagggtgatccgggtgaaccaggacctcaaggtgaaccgggacctccaggaccccaaggcgagccaggcgagccaggcccgaaaggtgaaaaaggtgatcctgctgtcattgaagagggtagcattgcacatgaaatgctgggcgaaaaatcagttcgcagcaaaaacgttggcagtggcagcatcatgttggatcatctgaacagtgaagtgaaggctgtgcttgatggtatgcaaaaacaaattgatgaactgaaatccgccactcctgcagaatgaaaggcaggtgatgccagatgacagaagcagaaaaaatagaattaaagaaagtgaaaaaattcctccgggtcgatggtgatctggaggatgatttgattttagactttatcgcatcagcaaaagaacatataacaggtgctactggccttacatttccgaataactcagcacgagcagctatgtgtgtaaaagcttttgtgacgcattggtatgaaaaccgggagatcgccggcacgacatccaatcttgatggggtgctgactatgatgatcaatcagttgaaatatgtagttccagaggtgaaggctaatgctgaatgatatgcggtatcgcattcaatttcaaaaaaagaagcccggcggccgtctgcctgtggagggaaatgatagctgggaaacagttattgaatgctgggcaaaggcggaaggcttaaaaggccgggaatattatgctgcagcggccatacaaaaagaaaaaacagttcaatttacaatccggcaccgggaagatatcaatgaacatatgcgaatcgtctttcagggcgattcatatgaaattgaggctatcttgccgaattattcgcggcggcatttcattacgattaaagcgaatgtggtgagccgatgaactttgaactggaattgaaagggtttagagagcttgaatctactttcgctgatctggcccgtaaggatgaaaagattcataaagcagcagtgaaagccggaggggctgttttggctgcggaaattaacgaggaagctccacgctcttccattggcggaagtcatccgcacattgacgatgatattatagtcggcagccgtatcaggcgggatgaagacggagagatatacgcagttgtaggccctacaaaagatacaaaattccgtgttcacttgccggaattcggcacgctccatcaagctgccaatccatttattcaccggagtatggtaaaggcgaatggcaagatgcttgatgctatggaaaaagtcataaaggcgggatacaagctgtgaatcttatcgaacgagctgcacaattgaaaaacagtttatttgaagcgctggaagcccatccggcgcttttatcattggttgaccccggcaatatctatgaattggcagtgccggaagggataaaaagccagccgccttatattgtcgtacaagaattagattatcgaacaaccaaatgggcagacggtaagcctatccaggacagcacgctatatcagattgatgcgtaccacaatcagtcttgtgaatccgtaatggctgctgtcgttgatgcaatgggaagttttgatttccagacttatggtcctattaatgagtttttacaatctgagcgcctcattcgaaaaggttatcggttcgaggccaatattttattataattggaggttttatcatgcccgaatacagttctatggtgggattggaaggcgttaagtattcaccattaatcaaaaaagaaggcttgtggatcgccagcaagatcattgattatccacatgctatcaacgcaaagatggcaaccgattcatctacagaaaaacagtacgcagataacaaagtagctgatttagctgtctcgactggctcaacgaaactcgacttagaaatgcgagacgtaccgccggaacaccttgtcaatttatttgggatagaggaaaccaaagacggtctatatcttttcaagaaaaacgttactccgccgtggatcgcgattaccttctttggtgtcaaagcaaacggaaaaaaacgtcatgtaggcttagttcaaggtcgatttactttgccggatgatgactggagtacaaaaaaagaaaaaatagacttccagacctctaaattgtccgcggagtttcttgaaagagagcaggatgacgtgtataaaatcatcgcagatgaagacgcgcctaatttcgatttagacaagttttatgaaaaggtatacggcaacgcctacacttcatctaaagatgaacccaaagcaagtaaaagcactgatcttggcgcttaaaaagggaagcagagtgcttcctttttagtttctataacaattaaaaggaggagtcgacatggctcaaaaacatatttcaatcaaactatggttcgaagatgaaaagaaattgaaaacatttattgcacctcggacaaatacgaaaacacttattgaagcattacggttgaacgcagaagctgaaaaaacagcagaaaatttggagaaaagcatcaagattcttgaaaaacagctgcaatttattgttgggctattccggaaccaatttacttacgatcaattatttgaggggctggaatcttttgaagtgactaaggaaataagccgcattctctcggaagttgccggctataaaaaaattgaggatgctgatcaggattttttgccggaacagacggagaagaatacacctacgagcgcggaatagagcagataaatgaaatttacgccactctcctacaacaagggtggagtatgagtgcaattgacgagatggatatatatcactatttagagatattgaccgaaaccaataaaccagaagaagtgaaatttgaagatgtcttcttttagacgggcttttagcctgtctttttttgttgaatctttgccaggaaagcggggtggatacatatggctcaaccaataggaaatatggtcgttaaggtcggccttgatgatacaggatttaaccggggtattgaaggcttaaaaaggcagatgcgtctggccaattcagaaatgaaggcagccggaagcatctataaaaatgctggtgatcaatcaaagctcctgcaatcgcagatggagggcttgagtaataagtataagattcaaggccggttggtccaagagcaccgtcagcggtatgaagaactggtcagacaaaaaggaaaagacaaccgagagacacagattcaggcgcggcgtttgaatgatgctattgcggttcatgagaatctcggcaaagagctgaataaagtcagcaaagagtttcagaccatgtcagacagcagcggtcgggctgcaggaattttttctgtttttaaaaaggattcaaaggatgtatcaaaagagctgaacgctgtttataaatctgcaaaagccacaggaaaggcattagcgggaattggtgccgccggagcgcttgggatcggtgcaaccgttaaggccgcagcgagcttcgagaaagatatgagccgtgtcgccgccttggcgaacgcaacaaacgatcaattggcatcattaacagaaacagcccgtcatcttggcgccgtcacacagtatacggatgggcaagtagccgaaggcatgcagtatttagcgatggccggctataagacgaaccaaattatcggcgctatgcccggcttgcttgcgacggcagccgccggacaaaccgacctcggcgtaacggctgatatcgtttctgacatcttaaccgaatttcatataaaggcagaggacacaaaccgtgttgccgatgcaatgacgtatacgttcacgaactccaatgccactttgcaggagattggccaaacgatgaaatatgcggctccggctgctaaaacagcaggtctcagtatggaagaattggccgcggcaaccggtattcttgcaaacagcggaataaaggcagacatggcgggtacagcacttcgatcgacgcttactcgtttagcggctccgcctaaacctgcggcttcggctattgaagaattaggtttaaaagtgacagactctaccggaaagatgcgcccgctggccgacatcatggggcagatcacagagaaaacaaaaaattatactgaaacagaacagatccggatcgctaaacagctggccggacaacatgctatatctggatttatcacgctcatgcatgcaggtaaagataagctggaagaattcacaaaggaaatagaaaacagcggcggtattgctgaaaaagtggctgacacgcagatggacaacctggccggatctgtagaatatctgaaatctgcaacaaacaatgccgtcatcaccatgggaaaccagtttataccgatcatcagagctgctactgacggcctgacttcattagtgacatggttcgacgccttaccgaaatccgtcgcaagcacaattgctattacggccggagctgtaacagtattttctctttttggcggggctgccttgctgttaatcggggcattaccgaagatcgcagcaggatggaacatgctccgtacggcggggggatatttaaccggtaacgtcaatcgggcatcggcaagtctcggcgtttatacgactgaagccgttgcggcaggcgccgcatcccgaacagcggcagctggtattgcgacaacttccactgccgcaacggtagcagctacccgaatggaaaggctcaaccaaacaaacaccgtggcaacgacacgagttggccggctggagcaatcggcaaataaaagctcgaaagcgatgcgcgggcttggcggcgcctctcgtgtggccggtactgggcttactcttttcggcggtccaatcgggacaattgccggcctcgttctcacctttgcccctgaactgttaaagttcggcgccggaattatcaaaacaggattaagtgcagtaaaaggagcgggcggatttacgaagcttgcaaaaagcggtttcggcctctttaacatacttaaaaaaggcactgctgttgtcggtcttttacgtggcggacttgggttgttgggcggaccagtcggcgcgctcattacgggtgtgaccctcttagctgatgccggatttaagtattatgacaatttaaagaaacgagtgcttccggcgacaattgattttggagacggtgtatcaaaatccacagcaaaagccgtcaacgcctatgaagacatgaacattgaggttacagccaagctgaacaccctgaaagcgaccaatgctaccatcacgaacgatatcgcagatgacatgtcaaagcgctttaaagacatgggagattctttgaaaaacggatacaaaaccagcgcgaccaatgcaactaaagtgctaaaagaattttatgcttctaataaagggatgtctgataaagaagaaaataaaatcattggcaaaattgatgcttataacgagaaaaaacaaaagaagatccaaaagtatgttgatcgagtagatgaaatttataggactgccgcccgtgaaaatcgaaaaactacggaaaaagagaataaagaaatagctaaaattcaaggcaaaatgcttgctgaaatggaaactgctctctcacgaagtaaggctgagcagataaagatatctaaaaagttgaaagaagaggcgtctaatctttctgctaaacaagcggctgctgttataaaagacagtaacaaggcaaaagagaaaacaattaaagcagctaagaaacaacgtgatgccgttattgatgccgcggatgagcaacgttatgtaaaagggtcaatttctcaaaaagaacacgataaaaccgttgaaaacgcaaggagtcaggcaaaaaagacaattaaagaagcaaaagaaactcataaaggtgtcgtagaagaggcaaaaaaacaagctgctgggcatattagcgaggttaatacagaaactggagaggtactcggcgtatgggatctatttaaagtagacttggctgagagagttaatgctgttactggctggatcaataacattttagaatttatgcacatggatactatcccagagtggaagcctgctggatacgataaccgtcagccttcctctatgcaaattgcaccgggagtagcctatgccaaaggaacagactttcaccccggcggtcgggcattagtcggggaagaagggtgggagcttgctcacacgcccggtatcggcacttacattgtcggaatgggcggcccacaagtgtgggatcttccgcgcggcacgtctgttcttccgcacgctcagtcgaaagaagcagctgccacagggcttcccggttatgcaaatggggtcggaaacttcttcaaaaatgcgtttgagggatcaaaaaagctggtgaaaggcgctgtctctgtcgggaagaatgtcattggcaaaacgaaggatgtcgcttctaacgttatggaaatgattatgaaagggccgcaaaagataatcagcagcattttcaaaggcatgatcccgtttaaaacaggaaccggaattgacgggttagggactggtattctcaaaacgctaaaaagcggtgcccttcaattcttaaaaggggtcttgccggatgtgggattttttacggcagatgcctataaaggcgcaaccggatctgcccaggtccaaaaatgggtaacagaagccgtcggcatcgctggcgtcccgttttcatgggttcccggcttgatcacgattgccatgaaagagtcaggagggaatccaaatgtcgtcaacaggtgggactctaactggaaggcaggtaatccttcacagggactaatgcagacgattccaagtacgtttgcctcaaatgcatttccgggtcacaacaacattttgaatcccgtagatagcgttttggctgctattaattacatcaaagggcgatatggagacatatcaaatcatcccggcttgaaatcaatggcccgcggcggcccatacgtagggtatgcaaagggcggtacttctccggggcgcggcggctccaagctcgccgtcctcaatgaacgagggtacgatgaaaccaccattacgaaagatccggcataccgcgaaaggaacatcggattgtgggcgcgggttgggcgtgagcttggcgtcctgccttctctgcaggaagggatgatctcgaaggctttactattgcttcaaaaagcatccgcggcacagcctgaaaatgataaaagcgtcaatattgatatgactcgggtcgtggaaaatcaagaaaggcaaatcagtatgatggggcagcagatcgacgctctccagcagaacattcagctactgcaacagctgatcttaaaagataacaacacctatattgatggtgcccgagtagatcaaacgagtgctgaccgatatagaagaaaacaatatagaaacgggggtaagccggcttggtaaagctatttttggattttaataacggattgggggagcagagccttgacagcttgctccctcaatttgaagtgttgagttttttggcggaagcgccgattattaatcgggaaacaattacaagcccgcgtcgtcatggagttatcccagcacaacacccacgggatgtgacctattcgccaagaaaagttactgtggagatatatgtggactcattcattcacaataatttttatatgcttaggcatcagctttatgcgttattggtgaagccgtttccctattatatttcaactgacttatggccgaatcgccgtttccttgtcacttgtgatgggaattttagtattccgaaagaaaaagagaagacacgcgcgagcttctcagtggagtttaccaatattaccggaatggcagaatctaaacattcaaccaaaacagcgcaaactcagtcaggagagaactggaatatcggtatgaacctgcggtcagatgacaatctggcctattattttaagaatcaaaaacatttctctgtctttaattccggagacgtccaaatcaatcctcttgatcacgcgtataacgtcctattgaacgccaaggggaagaatgtaacgctaatcaatcataccaatggcgaaaagttaacgattgaacaggagttgaagaagtcacagcaggtatcatttctaaagcagtacgcgttgctcaataataaaccaataaaaacatctggacgtctgccaaatctcgaaattggatggaatgagtttgaagttcagaatgccgatgattttgtcatagaatttgacacgcggctctattacttgtaaggcaggcggtttgtatggcgaatacagattttattaaagagattgccggagacgcccagcaaatatataaaaagcaccgtattctcgcatcactgatcattgcgcaaggatgcttagaaagcgcgtggggcacaagtgaattggcgacaaaaggacataaccttttcggtatgaagggcgaatacaacggccaatatgtcattatgcaaacatgggaagttatcaacggagaaaacgtacaagttccggctaaattcaggaagtacccttcatggaaagaatctatacaagacctggcgaacctgtacttgaatggcctcagctgggacaaaaaccattataaagctgtcgtcggggaaacagattatcagaaagcaactgcggctctcgtcaaagccgggtatgctaccgacccaaattacgcaacaaaattgaacagcctcattttcacctataaattaacgaaatatgatacaaccgagggagtaccagacgaaccgagtaatccgagcacaccagatcctgagccggacataccaagtaaagaatatgacggtaaagacattacgttgaatcaaaacttgccaaaagacgtttatttccctcagctgcatgtttccagtcaagacggaaatcaagtggtcgaagtcataggtgccgatccggatctgctagatgacaccaccggaaaaaaagatattgagtttacaatcactcggactgctgataatggcattgaatatgacttgctcataaatgacaatattctttacctggatgaaaagaaatttaaccatcaaaaatactttattacgatgatcgaaatcgatcaggaaaagacactcagcaagaaagtttctgcaagccatgttttcgttgccgttttgaataatcattatgtagaagagacgatcagcggtacattgactgtaagaaaaatgcttgatttcacattgaaggggacgaaattctcttatattttcaaagacaaggaaagtgaatttgaaagtgtagagcaggagaattttggtgacaagtttgcgaatgaactgataagcgaaattgtggaagactacggtttagaactggatgtagataattacaagatttacatctataaaaagatgggaaagcgtatcaatcacactctcgactctcgttataatatgcccggtattaaaattaaaacatcgacagaaggctgctctacccgggcgcgggggttcggtgcgattaaggaaaacagcagcacagacagcaaaaaaacggagtacgtttttgatccagtcctttacaagcaccctgacgaagataagttcctgcttgatggcatgccgcggtgggctgagccactgcgcaacgagcgttataaaaaagagtccagcatgatgacggcgcttaaaaaatacgtgaatccttacccgaagatggaaatcgaagtggattatgaatacatctatgagccgaagcttcttgaaatacaagatgatttttggaagggagacacacttcatgtgctggctgatacagcatacggtgtgacttatgaagacgatgtccgactgctttccattcaatacaagcccttaaacccatatgcaaagccaaccttgaactttgctaatttccgtaaagatatccaggatatccgcatggagcaagaaaaacgattgaaagatcaaaaacgttatgttcagaaattaagaatgatgatttaaagcacctctattggggtgcttttcgttttagttgaaaggagtgttctaaattggtcaggcttaccaaagactatgataccacccgaaatgcccggtatacatctcaaataagggatgacatggaaactatagaaaatggaataaataaaattgatgatgatcttaaaaggcaccgagcaggaattgccgttcatgattcttcacagattacacatgatgggtacaccgtcgaaaaccgtttgaaaaatctgtttgcgcgatttactaaccttgtactgaatcatgacggtaaagacgtgaaagaagtcgtggattcccgcgtaacgacggatggggaaattgccgcaacattgaaagacaggctcgatagggaattcagcaagcttgacaggaaaatcaaacgcgttgtaaacgttgatgacttcggggctgacccgacgggaaaaacggacagcacggaggcatttaagaaggcattcggaatcggtaaggtgcaggtggttatgtcagctggcatttacgtcgtgaaaggtttgaaaattccttcctgggttcgtctcgtcggtcagggaatcggcgttacattcttaattttgaatgatgagacaccggcctcagaatgggtcattacgaatgcggactacgaaaaagggaatcgaaacattcacattgaaggattctcaacagactggaatcaagaacggcagggtggtttaagggcgacaggcgggcagcattccacatgcgttgcctttgcgaattcaaaattcatctggattaaaaatatagaaaacattaaccccgcacttcacggcattgatataacagcgccaacgtatgaccatctgccagataccgagtatacaaaagacgggtgcagatatgtatggattgacggctgcgttaactcagggtatggggatgacgggataacaacccattacagtgagtatattttcatatcaaactgccattgcacaaacccgacaggcatcgcacatgctgcgggaaaggctaactctaatggcattgagattgatgacggttctaagcatgtatggctgctcaacaactatacagaaggaaacatccgcggcgttgaagttaaggcgcataccgaatggccggcttcccaaaatgttcatattctcggccacgtttcatatcgggacgtgcgggcttatgatttgcggcatatcggccaccataaagcagatgatcctgagagtactacagcttatgatgtgacgttaacggactgcaccgcaatagaaccgatttttaatgatctgtatgagggaattaccccgcgtgctcttgttgtatccgcatataagaacgtgcagattgtcaattttaccgcaatcggaaatcccaattacgattataaaaacagtccggtgatagcctttcagtatcgctgcagaaatatcaccgtaaacggtattaaaatgagagggttcagaaaggcttctcatgatattcgagtgtacggaggcccacaaaaagctgattacgtgaagatctcaaattttgatatttacaactcggctcctgcagctttcggtttaggcggcggggtttatcattcaagcattatgaatggaacgattataggtaaaaacggaactatcggaattggttcgccgaataatcaaacaactattgtaggtgtagaagcagccgggtataagatatctgctcaattggccgggagagagtacagcactatcccgacaagagtaaaaggcggctttatgggcggcaatacttccggatcagctctgcatgaagcgagtgccattttaggcagtacaggtgacaacatcgcaaaaggccctgccaatgttctgctgggtgtccggggcggctcaacaactgaggggtcgcgtcaagcgctaatagccgtcaataactgccacacaaaaggtgacggcaactctagggctattcttgcagctcagggggttatcaacgataacggatacagcgttagaggcggttacgggacaggaactgcctcaacaaaaaatacgagatgggagttggattcgactggcggtcatattcgcggcacagggcgagtcgagagcgtctcagatttcaaagacttcgctgagtattttgagtctgctgacggcaagaaaattgattctagttatctcgttgcactagaaggcgaaaagattcgaaaagcggaaaaagaggacaagattctcggagttgtttcggaaactgcgggcgtggtgctcggcggtgctgcgttctattggaacgagcagtacgaaagaaatgaattcggcgggttggtctacgagacagttttccgcggcggcgaagaaatccgtctccccaaacttaatccagactacgacccttctctcgaatatgtgccgcgtgactctcgggaagaatggcatgtcatcggcctgatcggtcaagtctttgtcaggattgacgaaacagtggccgtaggggatagcgtatcagcaattggcggaatcgcgactaaagcggaaagcggaggatatggaactgttatgagaatcaagtctccgtatgatgcggaaaaaggatacggtgtagctcaaatgattgttacgccgcagcactaaggaggaaaaggaatgtacaaaacggggggcgtcgcatttgacatcaatgcgaaccggacaaacgggcgaaccacgaacatccaattcatgacgcaggacacgggcagcgcgaagctgtctttttcttttacaaaggatggcacgccgttgcccctgtctgctgtagacgcgaaaatcgttctattgtatgaagatgggtcattttacaaaaagagccttgctatcactgacaaggtgaacggaaatgcggaatatatgctttcagatgaagagcttaagcactatggaacggtaaaggctgaaatcaaactttactattcaaacgggcaggcgctggcgacttcattttttaccttctctatcgccaaaacgttagaagatcagaacatcattccaacagctgactattacattgacgattttgaaacgctgagagacggggtaaaccacattgtcgaagaaatcagccagaccgtcgaggaattacagaagaaatttgccgatctgaaagccattgaaacgaaagagggcgcacagaaaaaagcggatgctgcagaggaaaacgccaagtcttacacaaacgaacatgcaaaagataacgtgaaacatatcacggctgccgagagaaaagagtggaatgccaaggaaactccttccggcgcgcaggataaagtaaacgcccatgcgaacgatgccgttatacatgtttctgcagctgatcggaaagcttgggacagcaaggaaacagaagacggagcacaggataaagtcaatatccatgcaagtaacacggatatccatgttacagctgaagaccaagcttattgggatgacatgacccggcagtttaaagcccacaactacaatcaagaacggcatatctcggcagctgaacggaaaacttggaacggggctgccacctatgccaacatcatgctgaagaacggggccgccgcagggacgcggacaccgatgtacgcaaagtggggggcatttttaatcttacgagggcatgtgaaaacagacgccgaaatcatattcggctccatccccgcggcatacgcgcctgctggcggttctgttataacagtgccgttaagtggtacaggcggcacggccaatttaatcatttatgataatggggatttaaaaataaaatacccggacccggcggactcaagtaagatgggcggaggctactatctggatgtggtcgtgggctttcaggaaggaggaacagcatgattcaggtttatgaatacgatgaaaatttcattttgactaaacccgttccgattgagcctgatgaagaaggaaactacacaatccctgagaattgtacaaccgtccagcctccgtctttcataaaggcgatgtatcatcccgctgagaagacatggacggaggcggccacccaagaagaaaaagaagccatggaaaagcaaattgaaagtggacgggtaccttctcccgtcgatgaattgaaagctcagaacgcggccattacaacacagcttgcggaagcgcagagcctggccgagtcacaagcgcaaatgatagccaatctttatctagtgctggcggagggagggaaaggggtatgatggattggtttaaaagcgttaaaaccatctacggatgggggccgcagtattacagtaatgcagacgtggcccattttgttgagtggggaagaattacagaagacgaatacaaacaaataaccggcttgacctatccgatgacaaaacagcctgtcagtgtggatttaggcggcgccgcaaactgatcaacacccggagaggtgttttttattttgcctcgaaggaggtgataacaattggagggaatatacgtgtggatgaattttgagagcttacagatcgcaagagcatatctttttggggaggtgaaatatcttgatttaatgctggtgctgaacatcattgacatcattaccggtgtgataaaggcatggaaattcaaggagcttcggagccgtagcgcatggttcggctatgtgcgtaagatgctcagtttccttgtggttatcgtggcgaatgctattgatacgattatggatctgaacggcgtcctgacctttgcgaccgttcttttttatatcgcaaatgagggcctgtccatcacagagaatttggcgcagatcggtgttaaaatcccggccgccatcactgaccggcttcacgtaattgaaagcgacaacgaccagaaaacagaaaaagaggacaaagctgctgagtaaatccagcggctttttaaattctaaaaatagaataggagacgatgaaacatggtgaaaatcacaaaggactttattccagtaggacacaaaaacagaccgggatacgcaatggacccggcatacatcaccgttcacaacacggcgaacacggcacaaggggcaagcgcagccatgcacgcccgttatgagaaaaatccggaaacacccaccagctggcaccttacagtagacgacaaagagatttatcaacacctacccttgaatgaaagcggctggcacgcgggcgacggaaatggcaccggcaaccggaaatctatcggcattgaaatttgtgagaatagtgatggggattttgaaaaagccgtggcaaatgcgcaatggctgatcaaaaagctcatgaaggatcagggtatttcccttgcaaacgtggtccctcaccagcactggtctggcaagtattgtccgcgcaagctgcttgatcgatgggactcctttaaagcaggtatcagcggcgccccgtctaaaacggtaaattctcctgttgataaaacaaaagaatcttatattaaaaatacagttgttgctgacagccttaatgtgagaactcaacgcaatgccaactcttctattgtgcttgctcttcctaaaggttcggctgttcaatataaaaaaggatcgactcaaaatggttggggttacattaaatataccaattctaaaggagccacatacagcggttacgttaatgtaagctatatcaagagcgatgcagagttagggaaaaccccttcgaaatctgctcctgctaaaccttcaaacaagactagcgggggtattaagtctgtaggcaaaattaaaattgttggtgttaaaagtgcagctattattatggacaaaccagaccgtaaaaacgctaagaatgtggatacaattggtctcggcaagacaattaacatctcaggttctgttaaaggttcaaacaactctaaaggttattgggaagtcatccacggtggcaaacggcggtatgtgtctggacaatatggaaaaatggtttaagtaagctgtcccttgctacggcatttacggctgaagacaaaagcaaagccgaagcgctttaaatataattgaacccccttctatttggaagggggagttttatttctcaccaggctagattaatatcaaaatcgtgaacgtttgtagtaacatctttgtccggccaaaaatcccacttaactctgattgatttgatatcatttggatcatttaatttctttattggataaaggacatatccctctttttttgcccctgacataatttctccgcctatatcttcactgagcgacaaactggcatctatttgttccttagtattggtaagtagtgtgccttggtttggaaaagttgaaatatcctttttgctgccattgtcaataacaaagtgtacggctatagccccttcagcaccagattccatttcgtctttaacgatcccaacacgatcaattttaaatgtggtgtcatttttcttttctgaccaatttaactcatgaaccacggtagagtcatcttcattaccaccttcaaatacggtagaatcatcttcatcgctatcttcttgagcatcagaatccattggctcgatatttgctgatgaaatgggttgttcttcccttccacctagctcttcaactggtttagacataaaagaaaaaccgatgatcgcgagtatcaaagttgaaggaactagccaataacctttttttcttgttttgcgaaaaactaaaaatatcaatccaactataaagccgatcgttgaaaagattgtaagaaaacccataaataaaatcataataatccccctattgtttaaaacagatacttacattttaaagcaaaggaggattgatttctatgctctgtaaaggctttgaagacgctggaataaaggatcgaagacaaatgcgaggctcgaagcgcttttgaaataataaaaaatccccctcttcttatggagggggcaactgacttatgaaacgaccatgttaattatgatgtaagatactgctgaaatgacaaggaacgtgataagagccgcaattcccaactgtttaaatagtttggccttattgacagcctcttttccattcttcttttctttattaattctcaaccatgtaacgaataaataaccaacaatgaaaataggtaaagtgtattttacataaaaatcccacatgatgaccactcctcgggtgttattatatgcaattattgtggactgaatgtaaaggccaaagcccaagttatgtccgcttttacccctttacccttattattagcatctgcgcggtttgccattaacccaaaaaggacgctagctgctccggggatagctcccggcacaaatccaaaataagcagcgaaaacagcaattcctgcagccgtgctgccggcagtattcatgtcatgtacaaagttatcagtagcgcagctattcattttaacatgatagccccaccagtaatgtttagggccatagtttttgcctttacaagcaagaggcgtcatttctgaagatgcagacttcttttcaactatacttaaatcctttttggcttctagtttatcggcccttatctcagcatttaagtagtcaaaataagccttttgtccatccagcaaacctttttcaataccatcagattcagccttctcatagtctaaagcaaaaagaccattcttcactgatacatacttttctagggttaaaatatcttgtttgtcatattgttcttctgagtagcttttcacaggtgattgtttttctaaggcaaggacattcggagccaacgacatcaataaacacaaaaccaacaggacagacgcaaatttcttcatgaaattcctccttatgttatatcctacaattaccaactaaaacatatataggcttggttgtaaccgaaattacaccgaacgaaaaccgcaaatacagcgcaaaataaaaagacctttccaaaaatgaaagatcatttgaacaaatttctcatcatattattggttgcttttcctgcagcgcggcgagcactctttcttcaaggaatagctttttcatatgagtcccctcttgttttaaaccagatgtttacatctttaaaacaaatgaggattcattttttatgctttataaagacattggtagtgtttattatcacactccgaatacggaagcgaaatttaaaaatagactcctttaataaaaaaaatccagcaaatcaatagtttttgttaatattttcatctataattatagtattattaagcgaattgtatggaggattatatatgtgggagattggttatttgattttatgcgaggatatatttaataatggagatgatagggttcataaaaaccctttaagtggtcttcaaccagtgaatatccctggtaatttctcttttaaagtggccttttcaatctttaacacagatttagataacaggaatgagaagaatacccttaggatgctttttaaagatccggaagacaacattctgaatgatacaggagagattaactttcaatttgaaggagaagttccagagggcgcaacatttgaagttggtgaagccggcattggaatgaataatgttgtgttgccagtcgaaggtatctacactttagaagtccgtataaatgataacaaaaaaactttaaaggtacctgttggaaagcagaaggggataaaggatgatgttaatggaaaggattaaattcgatcgtgaaaatcaagaccctgtcttttcatttgaggcttccagatcagagatacctcaagagttaaagaattccataagcgttaagagcagtaaaaaaagtcctgtatcggggtatattgacgagaacgggccaataaaatttataaataacagtactgacataaaacatacgttgttaacagcaggcaaagagactctttctcacaaaggagatgatgggattgtgagctcagataaagacttgtttttcaccgaaattaaaaatgatatgagagagcgagagcaaagaacccgcacagagataactgagcgagagcaacgttttgaaaaacaaatgagtcaattcgctcaagaagcaaaagagcgtgaagagagatatataaatgataacaaagagagagaacaacgaatcatccaactaattgaaaatctggataagaaaattgaaaagcacgcaagcgcaaccgaaagtaaattggatgctaacaccaagcatacagaaacaatgaaaagccaaaacttttggggaaacatagcgatgtttgcaggtcttttagctattgtaataaccttacttgttgcattaactaactaggtaaaagcccttctaattaagggattttatttacctttctaagtgccgctttaaaaaagatgtgggcacctacggagcattcgggttatgttaaagcaagatgttcaaaataatcaagaaaaagcctcccttataggaggcatttatattacctcgaggtttgatgcttattcgatgtttttcatgtagcatgagaagccactcctttccggacgtgccgtgcaggaaaatggccagttgcccacagaatgcccacttctttttataaaacaaagaaaatcagagtaaaaaagaagatgtccattacacctaaaacccttgatataatgctttttgtttgcaaatcaattgtaatggaaaccattgatgaaccattgatctgatggtcacgaagattcaaacgatccttgaacaaaatgcaattttgtaataccatagcatagacataaataactcagaccatattatgtataggctggaagggaatgagacagttcccttctttccctgtttataaaccgaaacatttgcagaaaacacacattcagtttaagataaacagtacctatatgggagagaagaacgaggactgccctgtgttctcattcttgattttttcgtttatgctctcatacataatcacacgttattgttgagggacaaccaccaaggagtgaaggaacatggcacaagaaaaagtttttccgatgactcacgaaggaaaacaaaaactagaacaagaattagagcaattgaaaacggttaaacgtaaagaagtagtagaacgcattaaaatcgcaagaagcttcggagatctgtcagagaactctgagtatgattctgcaaaagaagaacaggcatttgtggaagggcgcatcacgacgcttgaaaacatgatccgcaatgcgaaaatcatcgaggacgacggcggttcaaatgtagtcggtttgggaaaaaccgtatcattcatcgaattgccggacggtgaagaagaatcttacacgattgtcggaagcgctgaagctgatccgtttgaagggaaaatttcaaacgactcgccaatcgccaaaagcctgcttggcagaaaagtggacgaagaagtgacagttcagacgccgggcggagaaatgctcgtgaaaattgtgaaaatttcataagatccgtttaacaatgaaacacctcgtccaaaatgtggatgaggtgtttttttatgatcgtatcaaaaaggctgaaagcggccgtgatttgttttctgctcgtgtttttctttctgcttgcgaggctggctgaaattcagctgtttttcacagaatctttttcaaaatccaatattaatctgattcaggaaagcgtcaagcagcggacggaagaagtccttatttcagacggacgcggctcttttcttgatcggaacggcaaagaactgaccggaaaaaagcagcctgccgtcatactgtttccctttctcgtgacgcaggattggccggttgaccgggtatcagacattctcggaatgaaacagggggagctcaggcagctgctcacggaagcgaaaaaaccggtggtcctgaacagcagaaaaataaaacatttgacgaaacaatccgtgtcaaatataaattctttgaaatatcccggcatttacggcgtatatatgaaagacagcaaggaaacaaacatagccgctcatctgttgggcgcgacaaaccaggaccctgagcttttgaaaaagaaataccccggcaggaaggaactgccgatcacggcaaagatcgggacaagcgggatggagcggacgtttgatgagtttttactggcggatcaggacacaaaacttttgtatcatgtcgacggaaggggaaaccctttattcggaatggacgtcaaatatacggctgaagcaaacgcgttttatccgctgcaagtcaaaacctccatcgaccgcaatattcaaaaagcaatggaagatgtattgaaagaccgcgggttaaaaaaggggggagccgtccttttagacattgaaaaaagcagtgtgctcggaatggtatcaaagcctgacgccgacatgtcaaagcagcagacactgcaaaattacatgctgacgccgatttatccgggatcagtgtttaaaacggtgatcgccgcagccgcaatagaacaaaacgaagtgaagccgggcacatcctttaactgcaatctcaacctgtacggagagccgggggatgacaaaggcacgctcagttttggagaaagctttgctcaaagctgcaattatacgtttacaagtcttgcggaaaaattgatcaaaaaagatgattccgttattgaaaacatggcggaaaaactcggtctcacacagcgggcgggctgggaaggcaagctgtaccgggaagacggattcaggcagctgtataatgaaaaaagcgggatcatttggggagatgacaaagacaaaaccgtaaaaaaagctgtcgcacagacggcgatcgggcaaaaaaacgtgaaagtcacgcctcttgaagtcgccaatatgatggcggcgatcgcgcgcggcggtgaaaaaaaacaagtcaaaatcgcggacaaaattgaatacaaaaacaaaacgacgatggcgtcattcaatgatcagccgttaaaaggggaaaacatcgacaaatatacggcgcagcagcttcaaaaaattctcagagaagtcgtcacctcaccgaaaggaaccggccgaaggtttcaggacctgccgtatgagatagcaggcaaatcgggaacggcccagacgggaatgttcacaaaagaaaaacagacgctttaccacaaatggtttgcgggatactttcccgcggacaagccgaaatacgctctcgtggtgctgcacatggacacgccgggggataaggctctgacaaatacagtgttttatgatattgttaaaaaggtacatgaaaatgaaataaatcagacatagaacaaccgctcagcccatgttaaaatatatgctgagcaagagggataaaggagtgcagaatgattgagcaataaacaatctcgttttgaaaaccgtgataagcgcagaaaagcaaatatggtgcttaacattttaattgctatcgtatctattcttattgtcgtcgttgccgtcagcctcttcatcaacagtccgtcgagcgacgtgagcgaaaaagcggacacgagccagaagcaggaaacacctgcatcaggcaagacgaagcagacatcggatgaagacataaaagacagcaaaaaagataaggcatcagacgatgacaaaaaagataaacaggataaggacacatctgattcatcttcagattctgacagcaaaaaagacgatgattcatcgaaaagtgatgacagcagcaaaaaagactctgattcaagcgatccttttaaaggcgcaaaaataacagagggcggctcatcaagcgatgtcgagaaaacaattgttaacccaaaatggaaagcggtcggcacaaagcagacgggagaacatgcggcgacgtatgactcaagctctgaagactggtccgaaatgcttgacgccatctcttacgccacaggcgtgtcaaaagatcatatgacagtgctgtggctcggaaacaatggaagcccgcaagatgcgaagggtaaagttttagacaaaacgaacggcaaaaagtatcaggtcaccatcacttggaaagacaaaaaaggctggaagccgacaaaagtagaaaccttaaaataaccgcaaaaaagcagctgattattcagctgcttttttctgtcatacgtcagctgaaaaatgcaccgacgcgctgtaaaggattctgccgtcaacggccgtcacctgatgggatacggaacggacgcgaagcataatcgcctggttgttttcaatctgaacgtttattttcttttcaagctcctgcaaagatgccgcttcgaaaaattctactttatctttgattaaatccaattgaaaattcatcagtacagatcctcctgatttttcttctgagtcaatgaaagtataagcctttctgccgtaattgcgcaataatcccaaagtattttagtacccttccattcttttttgtgataggataggaactgttccacgattaatccatactatactcataggaattataaaatatggagagtgaaaaatatgggccgtgaatttattcctttatttgaagattgggcagcgacttatgatgccacagtgcacggggctgacaaacaatatgccgctgtttttaaaggatatgacagcattcttgacagcattgtcgcactttcaggttcaaacgttttagagttcggaccgggaacggggaatttaacggcgaaattagccgctgcgaacaaaaaggtgtttggtgtagaaccgtctccgtcaatgagaaaactggcggctgacaagctttctgacaaagccgtgttcagtgacggagattttctggagtttcccgctccgccttttcaaatagataccatcgtcagctcgtacgcctttcatcatttaaccgatgaagaaaagcgaacggctgtaaagcagtatggcgcaatccttcagaagcatgataaaatagtgtttgccgatacagtctttaaagatcatgaagcttatgatgaagccattaaaaaagcaatccgaaacggctatcatcaattagcggacgatttaaagacggaacattatccgacactcgggacaatgaaaaacatcttttcagaagagggatttgccgctcggtttacgcagcaaaatgactttgtctggataatggaggcgattaaacggtaaatcgaagggattgtgtataaatgaaactggcagtcatcggagcaatggaagaggaagttacgattttaagaagcaaactgaaagacgcaaaacaagagatgatcgctcactgtgagtttacaactggcagctatgaaggcgtcgaagtcatcttgctgaaatcaggtatcgggaaagtcaacgcggcgatcagcacgacgcttctgcttgaccgtttcaaacctgattatgtgattaacacaggctcagcgggcggttttcatcatacattgaatgtaggcgacgtcgtcatctcaacagatgtccgccatcatgacgtggatgtgacggcgtttgactatgaatacggacaggtgccgggtcttccggcagcatacaaagctgatgaaaagctgatcagtattactgaggaagcggtttctgaactgaacggcattcaagtcgccaaaggcacaatcgcaacgggagattcttttatgaatgatccgaagcgggttgaagacgtacgcgccaaatttgcggatttgtacgcggttgagatggaagctgcggctgtcgcacaggtgtgccaccagttcaaaacgccttttgttgtcatcagagctttatctgatattgccggaaaagaatctgacgtttcatttgataaatttttagaacaggctgccgttcattcaactgagcttgtcctgaatgtcatcaaacgaattcactaagcgggggattctcgttctcctccgcttttccaggaggaggacatatattgaacgtgataacagatattacagaactaatcggaaatacaccgctgctccgtctcaagcattttgatataccggagggaacagcggtttatgctaagcttgagatgatgaatccgggcggaagcattaaagacaggctgggcgggatgctcattgaagatgcgcttcgcacgggaaaggtgaaaccgggcggcgttatcattgaggcgactgccggaaacaccgggatcggactcgctctgtgcgccagaaagcatcagcttcgcgccattttttgcgtcccggagcatttcagcagagaaaagcagcaaattatgaaagctctcggagcggacatcgtgcatacgccgagagaagaaggcatgcagggagccatccgaaaagcgcttgaactggagagagagattaataattcttatgccgttctgcaatttaaaaaccgagtaaatccattgacttactacaaaacgatcggacctgaaatatggaacgcgctcggcggggatatccacgcttttgtcgcaggagcgggttccggcggcacctttgccggtacggcagcttatttaaaggagaaaaatcctgccgtcaaaacggtgatcgttgaaccggaaggctcgatcctgaacggaggagagccgcatgcccataaaacggaaggcatcggcatggagtttatcccggattatatggacgagaaccattttgacgccatttacacggtggaagacgatacggcgttttcgcttgtcagagaagcggctgagaaagaaggcctcttaatcggaagctcttcaggggcggctctttatgcagcgcttgaagaagcgaaaaaagcgcccgccggatcaaatatcgtcactattttccctgacggcagcgatcgatatataagcaaaaacatttttcaaggaggccagtaagatgaagaaaaaaacgctgatggtgcacggaggaattacgggagatgaaaaaacaggagcggtttccgtaccgatttatcaagtaagcacgtaccaacagccgaaagcgggcgagcacacgggttatgaatattcaagaacggccaatccgacgcggacggcgcttgaaagcttaattgcggagcttgaaggcggcgcggcaggatatgcgttcggctcaggcatggctgcgattactgccgtcatgatgctgtttgacagcggcgatcatgttattatgacggatgatgtatacggcggcacttaccgggtgatgacaggcgtgctgaaccgcttcggcattgaagcggactttgtcgatacgagcagcaaagaaaaagtccaaaaagccatccgtccgaatacgaaagccatttatatcgaaacaccgacaaacccactattgaaagtgactgacctcaaactgatgtctgacatcgcaaaagaagcgggcgtattgcttatcgtcgataatacgttttacacgccgtatttccaacagccgctcagcttcggcgcggacatcgtgcttcacagcgcgacaaaatatctcggcggccacagcgatgtcgtcggcggcttagtcgtcacggctgataaagaactgggcgaaaagcttcattatgtgcaaaactcaacgggcggcgttttaggaccgcaggattcatggcttttgatgagaggcattaaaacgctgggactcagaatggatgccatcaatcacagcgccggaaaaatcgccgagctgcttgaagcacatgatgccgttcagacgctctactatcccggatcagcgaaacacccgggccatgagctgacaaaagcgcaaagctccggtttcggcggaatgatttcctttgatgtcggcagcagcgaacgcgtcgacgcgtttttagaaaaattgaacctgtttacgatcgcggaaagtttaggagcggttgaaagcttaatctccgtgccgtccagaatgacgcacgcatcgatcccgcgcgaccgccggcttgcgcttggcattaccgacgggctcgtgcggatctcggtcggtattgaggatactgaggatttaacggcggatgtgaaacaggcgcttgattcacttttataaagaatggatagatttacattctctgtcggctgtcagcttgtattataatgttggtagactataaaactggcaggtgaccttatatggagaagaaaagactgaaatcattaatagaagatcttaagcattacgcatttattctgcttgcagtcagcaccttcatttatatcggcgcggttcttcccggacaagggctgactgcgggccagaaaatgctgatgtttgtaacggattgtgtatttttagcgggcgcttatttctgcgttgaccgttcacttatttataaaaagaggctggaagaggccgatgaataaaaaaaagccattgtcttttgacaatggctttttcgtttcttattcagacggggtttcgcgtaattcttttcccattccttttaaaaactgcagcccgaagccgagcgcgcggttaatatcaggatcaccgacggctttcatcagttcaaacatactgactttcctgtcctcttttaaaaatctttgcgcctgatccgtcccggccatggcgctttctaaaagtctgcccataaattcgggatcagcttttgacagcgcgcctcccgcggccatcatcgtattcaggagattggtgacaggttcccgggaaatctgtccgagtgcgattttggcaatctcctcttttgcctggagcatatagccggcggcatcaaaaatgcccaagccattcagctctgccatgatggacatcgttttcgcgacggcttcttcattttctgcgagaagcgtcttcagctcttccagtttttcagctttcagctgttcctctgttttcgtttctttttgaatttcagtaattgggcttgccataatgtttcctcctttccttaatcagttaagtgcacatagcccggacggttccattttcgctgagcttccacaccgttttgcggatgacgttttttgttccgcggattcgttttcggaagcggcggagtatcacaggaaccgagcacttccatgcggacttttgtctgcttataggcaggtgtatgtgtccgtgaatcatacgcaggcccggtcaggaaattaatcgcagaatctttatctgtagagttcatcggcagataaagctcatttgcgcggacgcggtctgtcacaagcgcgttcaatttaaccgccccaaaaggagagacgagccggatcattgtcccgtcgcaaattccgcgttcagccgcgagctccggcgatacttcaacaaatacatccggaactttagactgaatgccttttgacttgtttgtcatgtttccttcgtggaaatgttcaagcatccgtccgttgttaatatgcaggtcatattcttcagggaatacggcaggctccacccaatcgctcagcgcaaaacgggcttttttgtccgggaagttaaagccgtcttcataaagaagcggagtgctttctcccgtaaaacttccccacaagaagctgttccagccgctaagaacgtcgtaacttgcttttccgaacagcggagaaaggctcgccatttctgagaaaatgtcgctaggatgcgtgtaattccaatcagcgcctaaacgattggcgacttcctgaataatccaccagtcgggttttgcatcgccgagtgtcggaagcgcctgatacaatctttgcacacgccgctctgtgtttgtaaatgttccgtctttttcaagagatggaaccgcaggcaggatgacatccgcgtattgcgccgttcttgaaaggaaaatatcctgcacaacaaagaaatcaaggctggataaaatgttatgaacatggttggcgtttgaatcgacgagcgccatatcttcaccgacgagatacatggctttcatgtttccttcttcaatcgcatggagcatttcgatattatcaagacccggcttgccgtcaatttcaacaccgtaagctttttcgaatttagcgcgtgccgcatcatcggtaatatgctgataccccggaagccagcctggaagagttcccatatcgcaagcgccttgaacgttgttatgtccccgcagcggataggctccggcgcccggacggcggtagtttcctgtggcaagcagcaggttggaaatcgccgctgatgtatcagagccgcctgtattttgagtaacgcccatgccccaaagaacacaagtgccgtctgcatcacgaatcatttcggcaatgcggatgatcgtatcctgagaaagtccggtgatgcgctccgcatattccaatgtgtatttttccagcgtttctttataatcatcaaagtagttgacattttcatcaataaacgcttgatcgtgccagccttggtcaatcatatatttcgttactgccatgagccagacctggtcagtcccttgtttcgggctgataaagaggtcggaccgttcagccatttcatttctgcgcagatcggcaacaatcagtttttggccgtgcagtttatgggcgcgtttcacgcgtgtggccagaaccggatgtccttccgccggattggcgccgacgatgagcacgaggcccgcttttgcgatatctttaattgtgccggcgtctccgcccataccgacggtgcggaataagccgtccgttgccggtgactggcagtagcgtgagcagttatccacgttgttggtttcaaatacttgacgtgccaatttttgaatgacgtagttgtcttcattcgtaattttagaagaagaaataaaaccgacagaaccatttccgtgttcgtccttgatcgaaccgagtcttgaagcgacaagatcaagagcttcttcccatgacgattcaacaaatgcgccgtttttccggataagcggttttgtaatccgttcttccgaattcacgaagtcccagccgaatttccctttcacacaagtggaaatcgcgttaaccggagcatcggaaacaggctgaattttaaggatgtcacgtccttttgtccatacttcaaaagagcatccgacgccgcagaacgtgcagactgtttttgtttttttcgtccgtttatcgcgcatagccgcttccacttcagacacggcgaagatgcttgtatagtcgggttcaacatttttcactaaatcaatcatcggttccatgacatcttcttttattcctgtcataaatccggcttggccgagcattgatttttccatcagtgcgttacaaggacagacagtgacacactggccgcagctgacgcaggaagattcattaatggcgacgccttcatcccaaatgacccgcgggcggtcgcgctcccaatcaattgaaagggtctcattcacctgaaggttttgacacacttccacacattggccgcaggcgatgcattggttcggatcatagcggtaaaacgggtgagacatatcaaccgcgcactttgaatcatctttcggcgtatacggatatttctgatgctcaattcccatcatttccgctgtattatgcagtgtgcaattgccgttgttgttatcgcataccgtacagtaaagcaggtgattctcgagcaggcggtccatggcctctgtctgagcctcttttacccttcccgacgtaagcgagatggacatcccgttttctgcagccgtggaacaagagcgctgcaatttcccgtttacttcaacaatacaggtgtcacatgtttgaatcggatccacttccggtacatggcatatttgcggaatctcaattccgttttggtttaaaatatctaaaatcttagacccctctggtgcttcatactccgtgccgtcaattttgacacggatagactgaacgtctgtcacttccaattcccctccatcttttaaactcgaaaaaaagccatgcacatagataccggcctcctgtacggagaacggtataaatacgcatggcggaatagttcactagcaagtcttactaacagaccaatcctatttgtataaaacgatagactcataacacgtttcctattacaaatccatcttcactgcttttattataaggtgatatttattataatacaatacgaaaggaaaactttaaccaggtgaaatgtcacaaaggggaaccgggaatgtctttcataggctaaaatcggaggggacaatatgtctaaaaaaattcatgaatttaacgatattatccggaaattgcgcaaagaattatttggaaaggggcctgaacgaattcacaccgtttttgtggataacatggcggtatctacactttacggcaatctaagcgcaagtgagcagtttatcgcacgcacgcctgaaggaagagaaatggttcatgcggcgcgtaccagcttaattcaggaactgtattcaaaacaaacgcctgacggaatggaagagctcatcggagcaaagctggtgcatctgttttcagatataaaaatagaggaaaatattgctgtatcggtgtttgtctttgaccgctcaattgaagagcataaagaagaaatcaaaagctgacaatattcaattgacacgaaattgtcacatttgatatgatatgaactgccagcagtggcctaaggacgattttttatggaatgtgtgcatgatctgtacatattctataccgcatattttcattctgcttgatattgttgtatgggtatgcatacaagttaggcagcattcaaaccccgttttttcagacgggttagttgaatgctgccttttttgttaggcgtctttggaaactgcgggctgaaatgataaatggaggggttattatggcttttcgtaaaccggacgaaatagcggagcttgcggtcgaatcaggggtaaaaaaggtgcattcaccgctttcagcactgattgtattaggatttttgggaggagcgtttatcgcactcggttatttgcttgatatccgtgtcatcggcgaccttccgaaagaatggggaagcctgtcgagtttaatcggggcgtccgtgtttcccatcggattggtgctcgtcgttcttgccggcgcggagctgattacgggaaatatgatgtcggtatccatggcgctgttttccagaagaatatccgccggtgcattagtgaaaaattgggtgatcgtgacgttgatgaatcttgtcggcgcactgtttgtcgcttactttttcggacatgttgtcggattaaccgaaacaggaccttacttggaaaaaacgattgcggtcgcacaaggcaaattggatatgccgtttggaaaagtcattgtttcggcgatcggctgtaactggcttgtctgtttggctgtctggctttctttcggcgcagaagacggagccggaaaaatcgcgggtatatggtttccgattatggcgtttgtcgcaattggttttcagcacgttgtagccaatatgtttatcatcccggctgcgatatttgcaggttctttttcgtggggtgatctgattggcaatctcattccggcctttatcgggaatgtcatcggcggggcagtgtttgtcggccttatttattttattgcatattcaaaaaaagatcagaaaaagcaagggatgaaaagagtttcctgaggtaagaaagatgccggaaaacacggacaattgaagcggaatgccagcacattttccgtccaaatcttgaaaaaaatgtttacaaaatggaagctgatggatatacttacaaagtaagaaaaaagcaaagggaggttgaatcacatgacgacgttaaacggcaatcaaaatctacaattgaaccgattcagcctgtggaagagttcgtgtccttccttaacctctgcccgtcaagcacgttaatttcggagtatcaggacattcgcagctccccgcagggaaagaagcaccgtcttcttttgtctgcggatttagtctgcccgcagcgcatatgaactttgctgcgggttattttcgcttgtgcggatattgaaagggggtgagcgataatgaccattaatcttttctttttaacactgaccatttcaaagcgttttaaaagtgcggaagagtatgaacgagaacagcaggtcgaagagttttataatgaagcgaaagaacgccagctgaaacacttttatatgaactaacggacacgaagggccaaaacggaggagaaggaggagatcatcatgttcagaattgaactgctgaatcattacacaatggagaaggaccaggtttagcgaggatgttgctgtcacgtcgcagacggcctgcataccatggtaaagaaagaaaaactggtaagcgggtgatagcatgcaaggcggtcagaacagaattccatccatcgggcacgggtatgcgtcaatgccccattcatttaaacacggctacggcaacccgtatcgccggcagagaatggcggcgctttcccggcacacaagatatatagcaccgtattattggtactagagcaggcggaaaacctacgttttccgtctttttttatgaaaacaaatataaatttcaaataaatcgaaacgttcatgaagagaagtgcgtctagttagtacctcatactaatacgaggtaatattatttctgaataataaatcacaggaatggaaaagcgggtgttatacaatgttgcaacatacatcttcagcattaaaacgaatgcgcgcgaaatactttgctgcatcagaaccggcagagtcagtcattcagcaaattttgatggacatacaggaatacgaccgcattttggaaatcgggaccggaaacggctcaatgtttaaacaaatcatcggacagcttgaaaagggcagtcttaaaagcatagaaacatcgaaacgtaaaatacggaaaacacagcgcgcaaaccgttcggttataaaagccgggctcggaaacattcagcaggggagaccggaaagcataccgttccgcgaccgcagttttcataaagtcttctcgttacatactgctgaaacagtcagcgattaccggacggcatgtaaagaagtgtaccgcgttcttcaaattgacgggtgtttctatatggttttgaaaccttcgcggatgagtgaaaaggatgtgattgaggtgctctatgatcagcatttcagagacatttcagttgtcagcagagattcattccattttattactgccattaaatagaatatttcttgggaaataaaaagagctgcttaagtcactgcagctctttttgtggaattgggcatatttccttatttttggttatttcacatatattttatattaaaaaaagtttttttcttatacaatggtaatcagatgaccgtacattttaaatattttgaacaaacggaatgaatattcattccgtatttagaaagggggatgaaatgacagcttcaaataaggttgaactcattatgaaagcgtcgcttactttgtttacagatagaggatttgacgccacgacgattccgatgattgccgctcaggccgatgttggaaccggcacaatttaccgttactttgacagtaaagagacacttgtgaacgtactgtatcaggaaagtgcgcagcgttttatgaaaaaagtcaaaacggactttcaggggatatctgtaagagaagggtttcatcacctgttttattgtctgattgattttacgaaggaaagtgagtatgcattgttttttcttgaaacgaataaggacgcctactttctgaatgaaacgagccgtaagcttcttgatgaaataacacagatgcttgacgtcttttttcagcgcggcaagtctgaaggtgtgctccgcaatctgccgtccaatgtgctgatggcgctgctgctcggggcatatctcaaactctatcagcttatccggacgggaagcgtcgaaataacaaaaccgtttttgaaagaattggaacaatgttcttgggatgccatcagaactcattaattattcgccgaaggaaggaagatcgatatgaaacagctaagcgctataccgcagccgaaaacatacgggcctctgaaaaatctccctcacttggaaaaagaaaaactgtcacaatcgctttggaaaattgccgaagaatacggcccgatctttcgttttgaatttccgagctctgtcggggtcttcgtatcaggccgcgagctcgcggcagaagtctgtgatgaaaagcgatttgacaaaaatctcagcaaagccttgctgaaagtccgtgagtttggcggtgacggactatttacgagctggactcacgaaaagaattggcagaaagcgcatcggattttattgccgagcttcagccagaaggcgatgaaaggctatcattcaatgatgctggatattgccatgcagctcgtgcagaagtggagcagattaaatccgaatgaagaaattgacgttgccgaagatatgacgcgcctgacgctggatacaatcggcctgtgcggatttcattaccgctttaacagcttttaccgcgacacacagcatccttttatcacaagtatgcttcgtgcgctgcaggaggcaatgcgccaatcacagagacacagcctgcaggacaagctgatgatcaaaacgagacatcagttccagcaggatattgaagagatgaattcgcttgtagaccggatcatcgctgagcggagggaaaatccggatgagaatctgtctgaccttttagcattgatgcttgaagcgaaagaccctgtaacgggggaaaggctggatgatgaaaatatccgttatcaaatcattacttttttgatcgcggggcatgaaaccacaagcgggctgctttcttttgcgatatactgcctgctgaaaaataaagataaattgaaaaaagccgttcaggaagccgagcgggtgctgacgggagagacccctgaatataagcagattcagcagctgacatatatccgcatggtgctaaacgagactttgcggctgtatccgactgccccggcattttctctgtacgcgaaagaagatacggttctcggcgggaaatatccgattgcgaagggacagccggtgacgattctgactccgcagctgcaccgggataaaagcgcgtggggagaagatgccgagttattccgcccggaaaggttcagcgatcccgcggcaattccggctgacgcgtataagccgtttggaaacggacagcgcgcatgcatcgggatgcagtttgccctgcaggaagcgacaatggtgctcggccttgtcctgaaacattttgaactgattgatcatactgattatgagcttacgattaaagaagctctaaccattaagcccggtgattttaaaatccgtgtgaaaaacaaggacgtgtccaatcagcagtccgcacaaaaccataaagctgcaggcagcggtcacaaagaagaaacgaaagaaatcccgtcccacggaacgccgcttctcattctttacggatcaaatttaggaactgcggaaggaatcgcggaagagctggctgatatcggaagaagcaaaggattttcaactgaaaccggcccgctcgatgattatgccgggaaactgcctgtaaaaggcgcggtcgttattgttacggcttcttataacggggcgccgcctgataatgcggcgggttttgtgaaatggatggaaacccttgaagatcaggaattaaagggtgtttcttacgccgtcttcggctgcggagaccgcaactgggccgccacttaccaaaggatcccccgcctgatagacaaagtgcttgaagaaaaaggggcaaaacggctgacctctatcggggagggcgacaatgccgatgattttgagtacagtcaggaagcctgggaagactcattctggaaggacatcatgaaggcttttcatatagaggccgctccaaaacagacaaacaaatcacagttatcaatcgaatacgtaagtgaagcagccgagacgccgattgccaaaacgtacaaagcatttgaggcggaggtcatcacgaacaaagagcttcataccgaaagcagcaagcgctcagtccggcatattgagctgcgtctccccgaaacagaaacgtatcaggaaggagatcatctcggggtgcttccgcaaaacagcggggaactgatcagccgtgtcattcgccgattcggtcttgatccgaaccagcactttaagatcaagggccggcagctgcctcatctgccgatggaccggccggttaatgcgccggagcttttggcatcctatgtagagctgcaggagccggcaacgagagcccagcttcgcgaacttgccgcacataccgtgtgcccgccgcaccaaaaagaattggagcatctttattctgatgatgcggcatataaagaaaacgtgctgaaaaaacgaatgaccatgctggacctgctggaagattatcctgcatgtgaactgccgtttgagcgctttttagaacttctgccgtccttaaaggcgcgctattattcaatctcaagctcaccgaaggcaaccagcggggagctcagtatcacggtcggcgttgtgacggctccggcatggagcggccgtgggcaataccggggcgtggcttcgaactatttagccggattacaaaaaggcgattctgctgtctgtttcatccgctcgccgcagtcgggtttcgcattgcctgaaaatccgaaaacgcctctcattatggtcggagcaggcacaggaattgcgccgttcaggggatttatccaggcgcgggctgccgaaaaaatgtccggtaacagcctgggcgaagctcatttatacttcggctgccggcatcctgaacaagacgatctgtacaaagatgaattcgaccatgcggagaaaaacggccttgtcaccgtgcatcgggcgtattccaggttagatcaggactgtaaagtatatgtacaggatgttctgcttcgcgaggctgcacaaattattgcccttcttgaccaaggcggccatctctatatatgcggtgacggaagcaaaatggctccggctgtcgaaaatgtactgcttcaggcgtatgaaaaggtgcataacactgattcaaaagtttccttgaattggcttgaacagctgcaggcggaaggaagatatgcgaaagatgtttgggcaggtatgtaacagaagagtgagacaactgaagaatgttttttaattgaagaaagccggcacgatatttgaaatctactgaatcaaaaggaatagttatagggagtatcgtgccggccttatctttagtatcggacaaaaggcacaaatctttaatgtttttattgattcacatgcaggcggctatgtcccttttttctgaattccgccagaaataaaatcggataagacagcaatagcaaaaccgaaataaatgaaatgataccgatccaatgaaaatgcgtccaaaagaaaccgccgcaagacccggccacgcttgaaccgatatagtatgcaagcagatataatgaagaggcttgcgcgcgatgatcaccggctgcgcggccgacccaggcgcttgcgatcgaatgcgcgccgaaaaagccgaaggtaaagacggcaatccccgcgattttaagcgcaagctggggcaaaagtgtcaccgctgcgccggcaagcataacaaaaatcgcaatcttaatcattttcgcgcttccgaaaagatctgcttttttccccatatagacagagctgaacgttcccgcgagatagacaataaaaataaaaccgatcacagtctgcgacaaatgataaggagccgccattaaatgaaagccgatataattatataatgtcacaaaactccccattaatataaatcccagagatattaacaaaagcagccgtttgcggtgcaggaccgctccgtattccttacatgccgcttttacgcccgcatgccgctcagatgaatggcgcggagccggaagaaaacgccaaaacaaatagcttaatacaatagaaagaatgccgatgatggcaagcgccggccgccagccgaatacatcggtcagaagccccgttaacagcctgccgctcattcccccgatgcttgtgccgctgatatacaagcccatcattttcccgaggcccttcggatcaaactcctcgcctacatatgtcatagcgacagccggaacgcctgccaggaaaataccgagcagcgccctcatcgccaaaagcgcgggaaaagccggactgaacgctgttaatagacctaaaacagaagtagctgttaacgacagcaccattaatttttttctgccgaatccgtcagacaacgaagcggcggccaataatgaaaatgccaaaacggctgttgagatggataaagttaagctggcagccgcagcggaaatatgaaactcttccgaaaacaaaggcagaagcggctgtgtcgtgtaaagggtggcgaaggtcacaaagccgctgataaacagagccaagctggcctttctgtaagcctttgtatgaggctgaataaacgtcatgaatgtccctcttttctcactgttggttatatatgtatcgtacgcttttcatttcaatgtgtctaatttataataactatagaattaatgcgtgtaggttatgaagaaaggggagaaggagaaaatggagcttcatcaaattgacaacttcattgcggcggcagctcatcagcatttcacaaatgcggcaaaagaaagaatgatttctcagccggcattaagccgatcgattatcaggctcgaagaagaattaggcgcgccgttattttacagagagacaaaagccgtccggctgacaaggcacggagagcagttcttaataaaagcaaaacaagcgagacgagctttaaatgaaggcgttgaacaagtgaaaaagaatatgagcctggagcacggcgaaatatctgtatcttttcttcatacgctcgggctgcgcttaatgcctcagctgattgccgaatttaaaaagctatacccaaacgtgaccttccggctttatcaaggtgcaaatgaaacgcttcgcaaaatggtggaaacgggagatgcggatatctgtctcagctccccgccgcttcccagcgagcttttacaatggacagtgctggagaaagagcctctttatgcggtgctacctgagaaccacccgcttgcaggaaataaaagcattcaaatgaaagagatgcaggacgaggattttgtgggttttaaaccgggatacgggctgaggtatatgtttgatctgatgtgccgggatttgaatatacacccgcatctcgcatttgaaggagaggaagtgtcaaccatattagggctgaccgccgcgggtctgggggctgcagtgctgccgaaaaccgcggagcattcatactttccggtcgtttttctaccggttgcagattaccaatgcgaacgcaccatagcgctagcccagctgaaaaaccatgctctttctcccgctgctgagtgttttaaacagtttgcacttgagtattacaaagcacgcaactgagcggtcattttattaaaatcgaagttgaaaataaagcagaaagaaatacagaaaacggaggaaaaccatggcgaaaaaaacagtgaaaacaaatgctgtccgtataattgagcagcaaaacattccctatgagctattaggttacaaaacagaagggggacagcccgcagacggtctttccgtttcacaaaaaatcggatacgctgccgaatatgtttataaaaccttagtggcatctgcaggtactgatcgttattacgtctttgtcgttcccgttgcaaaagaactgaatctgaaaaaagctgcgaaggcggcaggtgagaagaaaatagaaatgattgccatgaaggaccttttgggagtaaccggctatatgcgcggcggctgctctccgatcggcatgaaaaaaaggtttccgacttttattgatagatccgctgaaacactggagtttatgattgtcagtgcggggaaaatcggaatgcagctgaaagcagcgcctcaagatttagccgaagcaagcggggcggtatttacagacattgtataaatgtccgatgaatctaatagaacacgtgtcaagggagaatgataatgaaaaaaagatatgaaaacttgaatggcgtgaagaatgaacatggattcagggacatgtggaaatggatgaaagaacgaagagaaaaaagtaaagacttaagcgagaacattccgaaagcggtcacaagggatgtccgtgatgttgccgtcaatcggacggaaaccgccataacttggatcggccattcttcatttctgatccaaatacaggggcttaacataatgaccgaccctgtatgggcgcggcggatgggttttcaaaaacggctgacagagccgggatatgaattgagcgaactgcctgacattgatgccgtgctcatttcacacgggcattatgatcatcttgattttccgagtataaaaaaactgagaggaaacccggatttttacgtgcctgcgggattgaaaaagctgttcaacaaaaaaggccgcaaaaacgttcatgaaatgaattggtgggatcgttttgagatgcggggggtgaatatatcatttgttccggcccagcactggacacggagaacgctttgggataccgatacctctcattggggaggctgggtcatagaaagcaaaaacggcgagtccatctattttgcaggagatacaggctattttgaaggctttaaagaaatcggagagaggtttcgtattaaggcggctctgatgccgatcggagcatacgaaccggaatggtttatgcaagtgtcacatatcaatccggaagacgccgtaaaagcgtttttggagctgaaggctgacagcttcattcccatgcattacggggcattccggcttgctgatgatacaggccgggaagcattaagcagactgcacggcgagtgggatcggcttgcattatctcctgaaaacctgaaagcattagcgcttggcgaaacattttggctgtaacagcaggttttcgctgccgacaccaatcgtttaaaaacggttggtgttttgacgtcaatcaaaggtgaattgtctctgtataaaacatgatttttccggaacctgcggtaaaaaacaaaactttttactcttttgtttcactataaaatgaaaacggtttcgtatgcgcagtatatttaacctatcacaattgctccagcagaaacggacaggaaggatagaaaaacagatgaaatacatgaattcaaggcagaaaaagattttgtatctgttgttatctgaacctgatgactacttagttgtgcaagatttcgcagacagggtccgctgttctgaaaaaacgatcaggaatgatttgaaaacgattgaagatttcctgaatgaacatgctcaagctcagctgatccgcaaaccgggattaggcgtctatttacatatatctgaacaggaaaggtcacggttaagccggcaaatttataatgagcactttacgtgcgggcacaagaccgatgaagaaagaatacttcacatcgcttatgatttattaatgaattcaaagcccgtttccgcaaaagaaattgccgcacagcattttgtaaacagagcttccattaaaaaggatgtaagtgcggttgaggagtggctgaagcgatttgatctcatactggtttctaaacagcggcttggcttaaagattgaaggggacgaaaaaaacaaaagaaaagcattggcgcgaatttcagatttgattgataatgcggaatttacaagccaatttataaaaagtaagtttttaagttatgaagcggactttgtgagaaaagaaatcaagttattacaaaaaaaacattctatctattttacggatgaaacatttgaaagtttgctgctgcatacattgctgactatccgccgtatcaaaatgaaacagccggtcgccatttctgcaagacagctggacgcggtaaaaaagaagaaagaatatgaatggacactggcttgtttaaaacggcttgagccggtatttgccatccggtttcctgaggaagaagccgtctatttaactttacatataataggcgggaaagtccgctatccatcgcagcaagaaaagaagcttgatcttgaagattctgagctttccaaagtcgtcaggcatttgatcaatcgtgtttcagaactgcaaatgctggattttcataaagaccgggaactgatcaacggattgaacattcatctcgatccggtgttgaagcggctgagctatgatctctctgtttcaaaccccatgcttcacgacatcaaaaaaatgtacccttatttgtttcatcttatcattgacgttttagaagacatcaatcaaacatttgatctttatattcctgaagaagaggcggcctatttgacgctgcattttcaggcagcgatcgaacggctgcgccgaagcagtcataaccctaaagggacgatcatcgtctgccatatgggcattggcatgtcacaattgctgcggactaaaattgaacgcaaatttcatcacattacggtaaaagactgtatcgcaaaagcggagctgacagagtatatcaaaaagcataaagatatagatttcgtcatttctacgatagggcttggaaatgtaacgatccctcatattgtcgtatcaccgcttttggagtctgctgatgaaaagaagctcagcgcatttatgcaacagcttgatacatcacatcgccgggagcaaaaaacgtttaaaatgctgaacgacacgactccgtttctcgtttttttacagcaagagacagagcaccgttatcaggtcattgaaaagctggcgcaggctttgtatgaaaaaggctatgtagaaaaagagtatggcattcatgcagtaatgagagaaaaaatgtcggcgacaaatattggggcgggtattgccatccctcacgcgaactctaaatatatcaaacaatcagccattgcaatcgccaccttaaaagagccgattgaatgggggacagaaaaggtgtcgctcgtttttatgcttgctgtcaaacacgaagatcaaaacaaggtaaagcaattattcagtgagctttcctatcttagcgagcagccggcatttattcaaaaactgacggaagaaaaaaatgtgatgacgtttttatcgtatttaaactattaaaagcagggaatggctccctgctttttttctgtttatagggaaaaatgccgttatttccggaacttatggtaaaaaaacgtgcttatcacaggctgatttcagtataaagttgagacaagatcttgaaattcagactgcaaaggaggatttatatgaaactgttagcgattacttcatgtccgaacggcattgcccatacgtatatggctgctgaaaatttacaaaaagcagccggcagattaggcgttgagatcaaagtggaaacccagggcggaatcggggtggaaaataggctgaccgaagaggaaatccaggaagcagacgcaatcattatcgcggcggaccgttcggtgaacaaagaccgattcgcgggaaaaaagctgctggctgtcggggttcaggaaggcatccgcaaaccggaagaattaattcaaaaagcgcttagcggtgaagtgccggtctatcaatctgcttcaaaagctgaatccgcaagtcagcagggcaaaaaacaaaacccgatttaccgtcatttaatgaacggcgtttcttttatggttcctttcattgtcgtcggcggattattgatagcggttgcattgacgcttggaggagaaaaaacaccaaagggcttagtcattccggacgagtctttttggaaaacgattgaacagatcggcagtgcttctttttcattcatgatcccgattttagccgggtacatcgcgttcagcatcgctgataagccgggtcttgtccccggaatgatcggcggatatattgcggcatccggcagcttttacgacagtgcaagcggcgcaggatttcttggaggaatcattgcgggatttttggcgggatatgcggcgcttggaatcaaaaaatgtaaagttcctaaagcaatacagccgattatgccgatcattattattccggtgtttgcctcactgatcgtcggtttggcgtttgtctttctgatcggcgcccccgtcgctcatattttcgcatcattaacggtttggcttgcgggaatgaaaggttcgagctcaattcttctggcattgattttaggagcgatgatctcctttgatatgggaggacccgtaaacaaggtggcctttcttttcggatcggcaatgatcggagaaggaaattatgaaatcatgggcccgattgccgtttccatttgtataccgccgatagggcttgggattgcaacgtttttagggaaaagaaaattcgccgccgcagaaagagaaatgggaaaagcatcatttacgatgggccttttcggtatcacggaaggagccattccatttgcggcccaagacccccttcgtgtgatcccgagtattatggcgggttctatgatcggctcggtgatagcgatgatcggccatgtgggggacagagtggcacacggcggccccatcgttgctgtacttggagcagtagatcatgtactgatgttttttatcgctgtaacagcaggctctcttgtcaccgctctgttggttaatgtactgaagaaagatatggcgaaatcccccgcgcccggcgaggtgctgccgtctgccgcaccaaatgaagctgcagcggcaaaagaaacaaaggaaccatctcaggctgacagccgaaaagccgggatgaccgaaatcaaaaaactgactgacattatcagtacggacttgattgaaccgcatttatccggcgaaacgagggatgacattatcgatgaaatgatcgagaaaatgtcccgtaaaggtatgctgctgtctgacagcggatttaagcaggccattttgagccgggaacagcagggaaccacggcgataggtatgaatatcgccattccgcacggaaagtctgaagccgtcaaaacgccgggtgtcgcattcggaataagacgttcgggtgttgactggaacagccttgatggttctgatgcaaaactgatttttatgattgccgtaccgaaggaaagcggcggaaatcagcatctgaaaatattgcagatgttatcccgaaaactgatggatgacagctatcgggaaaggctgctctccgttcagacaaaagaagaggcgtatgagcttctggaagaaatcgaataaagcgggggatgatcatgtctactgaaccgatatttttcaatccggttttcaaagaaagaatttggggaggcgccgccctgcgtgattttcactataatattccgtccgagcggacaggggagtgctgggccttcgccgctcatcaaaatggacagagcacagttcgaaacggcatgtataaaggatgtacgctcggtgaattgtgggagcatcacagagatttattcggaaaccttgaaggagaccgttttcctcttcttacaaaaattttggacgcagaccaagacctgtccgttcaggtgcatccgaatgatgactttgccaaaatgcatgaaaacggggaacttggaaaaaccgaatgctggtatatcattgattgtgaaaaagatgcggagatcattttcggccacaacgcaacaacaaaagaagaactgatatccatgattgagcgcggagaatgggacgggcttttgaacagagttaaggtaaagccgggagatttcttctttgtcccaagcggcaccgttcacgcgattggaaagagcacacttattttagagacgcagcaaaattcagatacgacttacagattgtatgattacggaagaaaagatgcggacggcaggatgcgcgagctccatttggaaaaaagtatagaagtgatagacgttccatctgtccgtgaacggccgaccgttcaatataaacaaacagatgatctgctggcagctgttttaatagaatgtccttatttttcagtcgaaaagtgggatgtaaaaggtgaagcaaatctattccaggatcatcccttccttcttgtcagcgtgatcgaaggagacggaataatgattgcaggcgggcatgaatatccctttagaaaaggagatcatattctcctgccttccggtttgggagaatataaactggcaggccatgcaaattgtattgtgtctcatctgtgatcttcaaaacccttctctagcatcagagaagggttttacaaaaagggcgaaatctccagtgtatcagtgttttcgttcctgaatttattctctcaatttgtatatctcccgagccattgattcaagtatgtacatagcggggatttgggtggtgatattcgcattttcaacccattcttccgtcacgtaatatgaaatattcacatcggacattttggcaatggttgaatgtttatgatttgtaatactgatgacccggctgccttcttgtttcagctgattcagatgagtcaccgtagaatctccttcacctgaaaccgataatgcgatcgtgatgctgttatgacggaaatgggaatgggccggaaagtaaggatctttaatatacattgaaagtttccctaagcacgaaaaatatctggccccgtattcggcgagaattcctgaacttcccactccgataaaaacgacgctttctgcatcggccgcaagggctgctgcttccttcagcttttcttccatccctccgcttactgttctttcaaaaaactcggcaacggaatgatggggactctttaaaatcgtttttttatttgcctccgtatacattttcagcttcaccttaaactccgaaaacccttcacagtttatttttttgcagaaacgtaaaatagaagccgtagatacatgggtttcatttgccaattcacggattcgcatatagacgactttctcgctgttttgggagatgtagttgtataaagaagtttcaagctcgttaaatgaagcaatcatttcgtgtgtgaacatgcagggggattctcctttttatgagaatggtgaatgtacatctaatcgtaacatatcatttttaaaagaaacatagtgttatatttatgtgacaaatcactttttgtgtcattcaaaacaagacgtcagccaatgatttacggcgcaaaacaactgcggatataattcgttcatacgctttatgcatgatctctttaagggtctctgacaaaagcggccgaaaaaaggaggacaatatgagtatcaaactgatagcggttgatatggacggaacgtttttgaatgatgaaatggcatataacaaagagcgttttatgaatcagtatcgtgaattaaaatcgcggggaattaaatttgccgtagcaagcggaaaccaatatgcgcagcttacatccttctttccggaaatcaaaagtgaaatcgctttcgttgctgagaatggcgctttcgtcgtgaatgccggagaagaattattcgcgggtaacatgtctgaagacactacaaaagcagtgatccgtgctttagaacagtatgaggtgaataacgtcattgtctgcggaaaaaaaagcgcgtatattcatgaaaatgccggtgaagatgaatatctgcatgccagtaagtattattatgtgttaaaaagggtgccgcattttgaaaacatcgatgatgacattttgaaattttccatcagctttcccgctgaacattgttccgcactactgagccatttgaaaaacgccatcgggtctttcgtcacgcctgtatcaagcgggcacggtgacatagatctgatcataccggggcttcataaagcgagcgggattaagcttctccagaaacaatgggggatgggtgatgaagagtgtgcggccttcggagacagcggcaatgatctggagatggtgtccgccgtgaaatacggggtcgccatggataatgcgcaggaaagcattaaacaggctgccgcgcatatcacgcaatcaaacaatgaagaaggggtcttaaatgcgattgattccattctaaaatgtgaaaaaccctttgtctgaaaaagacgttttaactgcggaggtgctgaacgatgattaaattagtgattacggatttagacggtacatttttaaataatcaaggcgattttgacagaacgttatttgaaaagacaaaacgagtaatggaggaacagcatgtcgctttcgccatctgcaccgggaagcagtgtgaaagagtggaagctttattcggagaagatgcgaaagatttttggattttaggagacagtgccacacgtataaaaaagaacggcaagttcgtatatgaatctttgatcagcaatgaagcgggactgtcaattataggcgctttagaaaaaatcagctgcgggcatagcattatcgcatgcacaaaaaatggtgcgatcgtaaaagaaaatctgtctgaaagtgagatgaaatatgtaaatgcctcttatgcacatgtaacgaaaataactgattttactgagataaaagatgattttatcaagattacggttcatgatcccgacgccaactgtccggaaacgagagaaaagctgcatgaattttttcaccaattatatatcgtagcatcagaggatacctggatggacatagcaaatatcggaatacataaaggaacaacagtacaagaactgcagcgattattaggggtttcggctgatgaaacaatggcgttcggagacggccgcaatgacaaagaattgatggaagcggcatcctacagctttgcggttaagaatgccattgacgaaataaaagatgcggcgcactttgtcatcaaatcaaatgaggaaagcagcgttatgcacacgattatgagaatattagcgctgcaaaaacaatgagctaaaatcaatgcggcaggacttactagggatagaaaaagcgggctatcctcagactttaattcactcctgattttcctaaagtatgttaaaaatgaataaatatctatatttgactcgatggtattggtataatatgtataaaatgaatgaagcggtttaatatcaagatgaaaaaaatcacttcatatcagacaaaaagcaggaactgcctcgttttgaaattgggaggtgtttgtattagcccgctgttgagccccgcgtatatcattcttatttttcttccggcagcttcttttctgttagggattttaggatatttcatctttaaaaaagtatggatgatggttgttattgtattctttttgtccttgatattcatgtttattgtaataggtgccgaaccgacatttttcatttgggtggctatgatgacggggagctgttttgtctccggttcaatcactaagacgatatggactttcgcaaagagaaaatattagacagaagaatcctgtttgaacagctatcctttttttgtcgattgaagaaaaagaagtatagagttatccgttatgttcttatattttgtctgttgttgtcagatcgggctttctgttgaaaatgtctgtctatcgttttgttcttttttaactaaacggagcactataattgaactgtagatacatagaaaaacaaaaaaggataaggaggatttttatgtttcaaaccttagaccattttttgaaatcttgggaattcgaagccgatgcgacacaaaaactgctgaatcatctgactgatgaatcacttaaacaagaaatcacttcacaacattggactttgggccgtattgcatggcatactgtcgctgccattcacatcattacctcaaacacagatttaacgtttcacgctccggccgaagattatcatgttcctgcatcggcgcggtttattgctgagagttatcatcaagccagtaatgcatttgtacaggcgttaaaaacgcaatggactgacgatacacttcaagaatgtgtcaactttattggtcagcaattgccaaatggttcacttttgatgtttttaattcaacatcaaaaccatcatcgaggacaaatgactgtccttatgagacaagcaggtttacctgttccgggtatttacggtccggcaaaagaggaatggactaaattcggtttggaagctccgaaataggatattgttgtaagggctcgaatgaatagatgataccaatcgatgttagtatcttttttgttttttagagttattaaaccggtatccatgacatgcagacgaatcaacagttcaaaagatgtaaattaaggtcaataaatacagaaaggtgattatgatgataactaaaatgacgcgattcaatatgaaagacttcaataaaccaaacgaatctttcgttgtttcagggagaatcatcccttcatttgaaaacaatgtttggacatatacagaggagaaatttgctgaaccttatgtcaaaaaatatgatgatgaagacattgatgtcagttatattgaagaagaggataaagttgtctttttttattacgcagagaacgactgtgtcggccggagtaagcttcgttctaattggaatggatacgcactgattgaagacattgccgttgcagaagattatagaaaaaatggtgtcgggacggctttattgcataaagcggttgagtgggcaaaggagaatcatttatgcggtcttatgcttgaaacacaagatattaatgtttcagcttgtcatttttatgccaaaaataactttgtcataggagcggtcgatacaatgctatattccaatttttcaacagcaaatgaaattgcggttttttggtactgtaaattttagatgtttcgtcatttagcgggtgtgtgtcgcaaagtattcaaaacatcggcttgaggatttataataaggtatatcaatcaatgcagggggagttatggatgaagtgcaaaatcctttgttgaccctgcactgtggaaaaatgtcttgtttatgatgggcgtcctttgctgaggcctgatactcggcactgcagcaggatgtgtgtctatggttccttatatgatgaaagatgttcacatttaagtactgcggcaattggaagcgggattatgttttcccggaacgatgagcgtcatcatcttcggttacattggaggatggcttgttgatcggaaaggttctttatatgtgctgaccattgggattgcattgatgttttccagctttttaatcgctgccttttttatagatgcgacaccatggctcatgtccgttatcatcgtttttgtttttggggggctctccttcacaaaaacggttatatctacaatggtatctggcagtttgaaacaaaaggaagccggcgccggaatgagtctgcttaattttaccagctttctatcagagggaacgggtatttcgattgcaggcggtttattatcgatccgcttgctggatcaaaggctgctgcctgttaacgctgatcattccgcttatttgtacggtaatatgctcattctttttgcaggaatcatcgttatgagctggttggtaaccgtgaatgtctataaacgttcgcaaagaaatgactaaaaagggaaaaggatcaaacttgataaaagttttgattctttttttgaggagcttccttattccgaaaccttttgtcgatcaatgaaaggggagttaaagtgaattacatttataagaaaaaggaaaagaaaaatggaaattgtatcatttcaatcagagataaatgggagaatgcacttattgagtttgaacaaaaaaataatcaaattgagatcatgatcaattatcgtaacgagaaaacaaccaagttttcactgccaatcgagacttttgagaaagtgtatgaggatattaaaataggccggagagaaagttaatcattctgtttgaaaatgaccatgaagttcgtaagcagtaaagttttaacacgcatctgtattcccttggcaaagagtaaaggtttttgggtagttgtgttaaaattgtaagaaccttgtgcgacggacagggagttacgttgcttcataaggagggggaactatgaaaaaaaatattcacatactgggagcctccggagtcggaacttcaacattgggtgttgcattatcaaagcatttgcctcatacacatcttgatactgatgattactattggacagacaaattcactaagaaaagagaaattcctgaaagaagaaagttgcttgaaaaagacttgacaataaatgagaaatggattctttctggcgcagtgtgcggctggggcgatgatctaaaaagttactttgaccttgtcatcttcttatggattccgcaagatatacggcttgagagattaaggcatagggaatttcagcgttatggaaacgaagtgttagccggcggcagtaaatatgaacaatcaaaaacatttttagagtgggcttctttatatgataatgccggaatggaagttagaagcaaagctttacacgaacattggatggcggatttatcttgtccattgctaaaaattgaaggagattactcagtaaatgaaagagttgatcgtgtcttggattatctgaattctaattaaactaacggatggagataactgcaaaatccaaaattcaaagacagttccggccattttaacggagctgtttttttataccgctttcagtttctctgttgtgaagtgatttattttcggcagcatcctacaatagagaagtgatttgttcttcgttaagttctccgttggagtatctctctaaaattcttataaatcgttcatcacctaattaattatttctttgtttatttttattctccatctcattttcacaccgaattaaagccctctcataacgagaagggctttccgccttttaatactttctccttaaaaagaaggggaaggctctatccgtttatccctcttatcgtttattaatcaactctgtaaacatggggaattattggttaacttggaattttttcgatccaaacaaatatctttaaaaaatttaccggcaactttctggggcatatcgcagtgttcgattgtttagtccctttttttcataatctttacaaatctgaaaaagtcatcatcatccggcaggggcttgtcatcttcgcgtccattgcaatgcatatgcggatcagagtgatgttcattgtagaactctacgatatggaatccgcacttattcacatagaagttgatatttcgcttttcaaaataaggtgtcacggtttcccaaagcacagtatccggatactgtgcttctatggctttccaagcagaaagaccaatcccctggctgtgatgttctggagatacatagaataaatctagcgaattatgatgtgtttcgctgttgatacgtactactgcaccacctaccttctcaccatcccgaagaatatgatatacgactgctccgggagcgtcgaaagactcctgaacatcattgtccgatggaatcggtccatcttcgcaatcaccgaacgtttcaatcacggcgatcgcaaaggcctcttgtaattttttttggaattctggcagatcagattcctttgctggttccagaataacttttggttccttttttgttttcatgattgctcactccttcagttgctgaaataacgagttcagtcgttcagtgtaattccagctgctctgccgctttttcttccgcggtaaatttggcgttaaaatacttcaaaagctttctcctgtctttttgtattttttctttgtttcattggaaaacaagctgcatgtaacccttatttactatcgttcattaccgtattaagtgtcgtatgcgggatttgtcatcattctcgaatttttcctgcgaaaagttacaaaaatagtcgaatgggccgcctttgactatgaacatgcgtaaaagattcaatttactttcgatcatgagcaatgcacattgagtaaactccggtggatttattagcccaaagaagcctaaatgatataaaaataactagtatatatatcaaatctatccgtttaatgcccgcttcagtcaacaacaaatttgaagtcatgcaatctgtgcaaagggattatttctgtattgatttttccgaatgcagcggagttgctttaggactcccgtttactttgccgtacgtcagcttgcgccatactaattccatcggaccgtacttaaatcgtttcaaccacaatgtactaaagctcataagcacgaagtacacggccagactgaacatgaacgtgccggcggattgaatatgatccgcaagcccgaatccgtacctgaggaacagaactgttccaatgatagagtgaagcagataacaggtcaatgacatccgtccgactttggtgaatatcatcatagggcctcgcagctgaggaacatacagaaacagcattgcaaaagtgctcatataaaacatacttccggttaagccgccattttgacccaagacagaggaaatgtccttccacagcatattctcagaaaaattaaacatgtctagtaatatactgctttgtgttattagaaaagcgattgtgctaatgatccagatacgcttccatatgaactttttcgcttccatgtctttgaaaaattccatcttaacaaagtacacgcccagcagaaacatgagaaacatggaatagatcatggagaaagagccagcagccatcgtgaccatatctgtccaccgagtgctgatggattccatgtaggtaaggcttgtgtggctaaacaaagtaaactctgaaaaattcgggttttttgaccctgcagtattgatgacattgtacaacattgtgaaaacaggagtcaggaattgaaacacgataagtgcgataatccatctaagcaccgttttggccgtgcgttgatagaaggcgagtaacaggaagccgcttacggcgtaaaaggtcaatatgtcaccgacccaaacaaatgtgatgtgcaaaatgccaaaccccaacaggatagataacctgcgggcaaacagcttgttgggactatctaccttctgcgcggctcgatccataaagatcataaacccaactccgaacaagaaagagaataatgtaacgaatttcccttcggcaaaccaggaaaccagattgtgcaggacgtcatcggaggccatttcgaatccctttactgaatctacgatcagaaaatagttgacaataataatgccaagcaaggcaaatccacgtacgatgtccagaaaatgaacccgttcccgcagactcactggttgcccgcgtccttctttttgtacaatcatatcaatactcctttcccatttaccattgcaatgtgcagtgcggatctgaaaaacttgagccttacaatggataaatataaagacagaatcttaacaatttatgaaggttcatcatttttttaaaaatgtgacaaacttgtggcggacatcagctttcataaactgttaagatttacgtggtatcttataacgtacgtgttacttatgaatgatatatagtaaggtcacacgagagataacatcaagaatcatgaggtgaaagaggcatgacccatcgaatattagtcgtagaggatgatcatgatattggtgatcttttggaggaatcccttatgcgagcaggctacgaggtgctaagagccaaggatggaaagcgagcattgcaacttgtgaatgactcgcttgatttggttattttggatattatgatgccaggcatctcgggaatcgaaacctgtcagcacattaggaaaacctctaacgtcccaattctgtttctgacggccagatcgagtacactcgataaaactgagggattactcgccggcggcgatgattatatgactaaacccttctcggaagaggaacttcacgctagagtgattgctcaattacgcagatatacaatctatcaggaaaagaaggaacaggaagaaacatttcttatcgggggcaacctgagagtgagcgaagaatttaatgaggtttacaaagaggagcagcaaatcaagttgtcagatctggaatatcgtatcttgaaactgctgatgagcaaacgcaacaaaatattttctgctcaaaatatatatgagagtgtgtggggacagccttacttttactgttctaacaatacggtgatggtgcatattcggaaactgcgctccaaaattgaggatgatccggcacgtccggtttatataaaaactgaatggggaagaggatatcgatttggcacatcgtaaattcacgctaaccaaaaaactggctttgctgatcatggttgctgcgattgtgagcggtgtgttctttctgacgttgcaaaagattacagatgatctgatcgagggatatttgagttcggatgagtattatcacaaggagtcagcgagatacattcaaaaattcagtcagtacgtttcagaaaatgggttgtctacatcggatagaaaagcgtttggcgagtgggtcaaaaaagaaaattacattaacctcaccatattcaaggatcaggagctgcaatatgattccgtttattccgaatccgattatggaaaagaaaagctgactcagtatgctcgaaatcattcacatcctgtcaagttcagcgatggtgaaggacgagtcattatcgacggtttctactcttcccgatattatgatctggcctttacattggatttgctcggtgcaaccctcatctttttaatcattgttctcttgggcatccgtcaaagtcttcgctaccttaaaacgcttcaccaagagattcatattcttgaagggggccagctggactacgagatgacgataaaagggcatgatgaattagcgatgattgcaaagagcattgaggatctgcggaaagctttcttggacaaacttaaagctatcgaggaattgcaagcagagagccgcagcctggttaccgaaatgtcgcacgatatgcgcacaccgctgacgtcgctgatcatgaatctggagtttgccaaaaaagaaggaggcgaagcgggtaccagcaaagatcgttatgtagccaatgcttatggtaaagcactgcaattaaaaaacttgtctgacaatctgtttgcgtatttcctgctgaataaggaacatggggccgacctggagaccgttgcagtgaaagaagtgatctacgatctaatatcagatcagattgctatccttcatcaggagcatttccgggtccatatttcaggcgagctgccggaaacctatattaacgtgaatttggaggagcttggtcgtgtatttgataatgtgatgtcaaacttatttaaatacgcagatccggaagaagaaatcagcatcacgtttgtatcggatcaagaaatatttgagattcatgttagcaatacgattaaacttgcggatgtaacaccggaaagcaacggactcggtgaaagaagcattgcgcgaatgatgtcccgcatgcaggggcagtttcacagtatacaaaagaattccaagtactgcatcgtgctgcgattttggaacagaaagatgtaggctgcgaatcaaaacgacgaaaatattgaaataggagacaacaagatgagattttccaacaatttcaaaaaagcaccttacctgttacaagcgcttctcaatgtctgcctgttcttcctggccatagccttaagcggacttctgatcagcgagacatggtacattgtgcaattcgtatacaagtcactgttcaacaaagtggacagctattatgagatgcttggggaactgcttatattcttcatgtactttgagttcattgctttgattatcaaatacttcaaatcagactttcatttcccgcttcgctactttatttatattggcatcacggctgtcattcgtttgattatcatcgatcatgatcaggcgatctcaacgttctggtgggcgatggccattcttgcaatgatttgtgcattctttattgtcaatagacgaaattctgttgttgaacattaataaattagttcactttataccgatacgccactgaaatgtcctatgacttacttgaatactaaataggtgtaaaaagtggttattcatacggattgaaaaagaagaacacgcagcagactcacttgctcttgttgggggcaagtgttgacaaccccattactggtttaattaaaagaaggagtataaaacctgtatcaatggtgttactagatatctgcgacacaggttttatatgtaggtaactaatattctgatatatgtaacattgcattttttattatgcaatagttcactctatttctgctttcaatttttcgaaccactctaaattaaccaagtgatgtgaacgggaattttcgttcatacggcgaaagtaattgattgtgctgggaatttcttgagtgatggacaggtattcgtcaaggagctcgattcgagttttagtctgatcgatttgtgattggatcagatccagtaatttatttttgtcgaattcatcggcaaagagtaacgccccataaaattgcaggttcacatattccgatttggtgccgtatttgatcattaatttttcgaattctgcccttcccgaatctgtgactttaaagttacggatttcacgcccgccggttgagggtttctgctgaatctgttcaatcaaacacttttcttcaagttgctgcagattgtaataaaatgaacctttcgtgaagttaacgatgtacttgtaatgacgtttttccattaaggccagaagttcatagccgtgagctccggggttttggatgagcaagccaaggataagtaagggaatcatggtttcatcaccttcgccatccgcgcctcaaattccgcgtacgtaattttacccgaagccaaatccatactatgaaggtaaatctgttctgttttagaatagtcaccattcactttcagtgattgctcctctcccgaaatgggtttcaggatatggtgctttttcgaaagagcctcgaaatagcggtaaccgaatttgcgttgtgaagctgcgtctaaatgaatgccatcaggattcgcagtcaaacctgccgcagtaacaaaataacaattctgttgttcattagcaaaacgcagcaattgttcattaacctgtcgaaattcagtcgcgtgctgtccaaaaccagtcttcccaagaaagtcaccaagccctccaataatcaacggtacctcatcaagtttcaactcgtttcttagcgtcccgatgataagagttaatttctcgtaataagtttcatgcagcgaacgataactgtcactctcaccttggtgccaaaggattccgcaaatttgactggatcggagggcgaagcgggtttcggacaaagcatgctgaaaaaggatgccttccggatgccagtcattcaatgaactgccaccttccgcacacgggatcaagccaatttcttcatcgggatgagctttcgaccatgcatctgcaaaagatgcggccaggccaacgccggaaaccggacggtcgtaattaatcggctctgtcatcatctgccactgtccattgcgcagcatttttattttttcattatagatagggtctacttcattcaaaaatccacggcccgccatattcgactgccccaacattaaaaaagactttatcatctaatttttcacttctttacatcaatattttagtctaattagactatagtcaattcagcttgtcttgtaaagtttcaactaggttttatttttttattagtatgtatgaaaaacaaactaacattgaaaatttggtggatgtatttgagaattagcaagttcttttgctttaggtcttgataaacaatgaaaaaacaacaaaaaccctgtcatgtaagggttcctatgaggttcaaaatcatttttcataggaaatacattcaatgttgggggtgtagcccaaatgaaatggattgttaaaaagggagggctatgttgaaggggtaaaatatcaatgaaaaattattaaaaaggttaacgattgtaccaattctattcatttgttatgttttatttttaaatcctgaagttatacttgaagagcaatgtcctaaaatgcagaaaaagccgggatgtcagatccggcttttcgctcactttcccttcttcttccgcttctccttctccgcccgataaaactcatggaacatcttcatcaatgcgcgtttttcaatccgcgacacgtaactccttgaaatgccgagctcctttgcgatctcgcgctgcgttttttctttttttaaatcaagcccgaagcggccgacgatgacttctttttcgcggtcgtctaaaatatcgatatattttttgaccttttcaagttccatgttcagctgaatagtgtcgatcacatcttcgctttccgacttgaggacatcgatcaggcttatttcattcccttctttatcctggccgatcggatcatgaagggagacgtcttttttcgtttttttcaatgcgcgcagatgcattaaaatctcattttcaatacatcgtgcagcatatgtggcaagcttcgtgccttttccggctgagtagctttcaattcctttaatcagcccgattgtaccgatggagatcagatcttctgcgtcctctcccgtgttttcgaattttttcacaatatgggcgactaaacggagattgtgttcgatcagcatgttgcgggcgtgttcatctccttcagccataaggtctaagtattttttctcctcactatttgagagcggttgtggaaaggcattatttttcacgtatgatactaaaaacacgagttctttcacaataaacccgagcgctgcaaaaacacctgtcaccatcctcacctccacaaagttatgtaggcaaaagcctatatgtaactgtatgtggcagtcaggctgtttgtgtctgtacagggaaattaatcaaaggcaggttttatttcttacagcctcttgatttttgctgattgagcctgtatattgttaaaaaaagtaagggtgaaaacaatataaccgaaaagcgctgaagagacgagtagacagatatcattcatgacagagagctccgggagctgtgaaggagtatgaatggatgtgttgaagcaaacctcttagcttcgcatcggaatcatgcaacacgaggatgatgcggcggatactcctgttaccgagtaagctttgtacccggcttaggccggcaccaaaccgaattgaggtggcatagcgggctgtttcccgtcctcaagactttattgtcttgagggcgttttttatttttaagggagggataagatgaaaaacctgaagtcttggcggtacccgatgcttctgttaaccggaatcgggatagcaaatattggtgaatggatttattttttgtctcttaatcttattgttttaaaagaaacggagtctgcttttgcggtttccattctttatttaatcaggcctgcggctgttttgatgacaaatgggtgggcgggcagcatcatcgaccggtgtaacaaacggaatatgatgatgtcgcttgatttcatccgggctgcattcattgccgttctgccgctgatgtttactgtacggtctttgttttccgtttatagtatcgtgtttttgattcaaatggccaatgcgatgtttcgtccgagttccatggcgtatgtgacgatgcttattccggctgaaaggagaaaacgattcaattcactaagggctttgtcggaatcaggggcttttctcctcgggccggctgcggccgggctgctttttatcgccggcacgccgatttttgcgatttgggtgaatgcgggggctttagtgctgtccggtttcatcacgatgatgctgccgaaccttgaaaatgagcctcacgtacattctcccagacagaagctttctttggcagtgtgcaaagaagattggaagctcgtctatcgcttcagccgaacggcgcgaaacgtcatgatcatttattttttattcagtctggtcatgaccgttatgccatcagcgcttgattcgcttgaagccgcttttgcaaaagaggttcttcagctgactgatgccgattacggttttctcgtcagtgtctcaggggcaggcattatcgcgggggcgcttgtcaatgtgttctttaataaaaaaatgccggcttctttattgatgggaatgggctctttattcacagcggccggatatatgatttatgcgttttctgacgttttttggacggctgctttcggatttttccttctcgctttttttctggcgtttgccaatacaggctttctgacgttttatcaaaagaatgttccggtggacatcatggggagagtggggagcttttattcattaatcgaagccgtcttcgttatagtagtaacggcggtattcggagcggcttctgtcagttcttctgtccgcggcatcgtcatcgcaggcgctgctgttatgctggcgttggcagccgttttatgctcgttcttatttgcggccgcaaaaaggaggactcctgatgtatttcaagcggatcaatttaaacaaacataaagagacggccgtttcatttcgtgaggattcgtttttcgtcagctttggcacggcggatcattttaataaggatgaatatctcaggtggctgtcatcccaaatcaaatgctttcccgacggttttatgccgctttttcataacgggcagccgatcggacagcttgaagcttccatcaaattttaccgcagccaaaaaatcggttatgtgcacctttactatatgactgagcagcagaggggaaggggttgcggaacgaaactgcatcaatacgtgaggcagtttttcagagcgaacggtgtttcggaatatcacctgagagtttcgccgggcaatgaagaggctctgtcattttacagaaagaaaaacatggaagtgatcggttcagaatgtaacggaaaagttctcagaatgagaggagccgtaccgccggaatagggggcggtacgcgcttcattttttcgttgtttttaaaaggccgggaaacttcttataaatgaccgccattaagatgagcatatacattccgtaaatcccgaaagacagcagtttgttgcttgtaaatgaagcgcctgcgacggtcacgatcacaatgttcggaattttgccgagcaccgacgcagaaaaaaagatcggccatcggatattactcagcccgcagacggtattcatggcaagcgacggtataatcggaatcagccgcccgaaaagcaccgccgtaaaagcgtgctgatgaaatgaatcttcatattgggccgctgccgggtaagccagcagcttttttctggcccagtctctgaatccgtaccggacgagaaaaaacaatgccattgttccgagcatcgcgcctgacaatgtaatccacaccccgtttacaatcccgaaaaccgctccgtttaaggccgcgataatggcgaatggaacgatcggaaaaaatacgtcagctgcgaccagaaggatactcataagcacggcgtacatgccgcccgcgcgaatcatgctgagccagacgtctttttgcataaagccgatcatcacgacagcaatgatgacggcaagactgaatcccttttttatcatctgcacgttcacctcttttcaattagtatacagcacaaatctatctccttctattaaaataagctgtccgataagcgtacttgtttatcagcatttgccgtttgatgagaaacggctggcacccggatttggacaaaaacaagcgggaagcgggtgatgtgcatcatttgatgcagagaatgattttttataaaaggggacacgttaacagtagtgtttactggaggtgtaaacgttgagatgctttcatctgatcatcatgatatgcgtcctcacgagtctcactgccgtgtccgccgaggcgaaatctttaaaaagaagtgacatggagaagacgggaaacgtgtactgggatataaggtctgaaaaaaagaaactatctttaaccttcgatgacggcccccatcctgtctatacggaggctgtgttagacgtgttgaaacagcacaatgttaaagcaacctttttttgtgtcgggagccgtatagataaataccccataacggcaaaacgcatcgttgaagaagggcatgaaatcggcaaccatacgatgaaccatgtttattttcaccgactgaaacgcaaagacattttacaagagcttcacagctcagcgcatcatattacatcgctgcagccggaaggggacaagttattccgcccgccgggagggtcgctgaatcatacggctttcaaaagcatcttaaaagagggctatcatatcatcatgtggtcatggaaccaagatccgagggactggaaaaggcctgggaaaggaaaaatcgtcaggcacgttgtttcacatgccagagatggagatatcgttcttctgcatgacggcggaggaaaccggcgccagacggttgaggctttgaaagaaatcattcccaagctgaaaaagcagggctacacgtttgttaaggtttcggatttgatcggacaggattccggtccttttcatatccagtaaagagagcgccgcgttgaaagccgccaaagagatgtgtaccataggaggtaaggtttggggggagagaaaatgaagtttgctgttctttttattacgataatctgtctgttatcaggatgcgccgcgggcaaagaaaaaagtgttgtcgcgttcggcgacagcaatacgcgcggttccaactgggattatcgtgattatccgaaggcgcagcagtgggtaaacattttaaaaacagcggaacgcggccgtcttacagttataaatgcgggaataggcggccagacgactgaggatgcgcgcctgcgttttcaaagcgacgtgctggaccgtaagccccaatatttatttatcatgttcggaacaaatgatgcgggcattttgacgggcgatcagccgcgggtatcaaagaaacggtttaaagaaaacctgacttatttcataaacgaaagcagaaatcacggcataaagccgattttaatgacgtgcatcccggttatagaaggaaacggaacgcatcatctctattactattcgagatataaagcctcagcctttaaagaaaaaggcggcgcgagaaaatggcataattcctataacggcgttacgaggcaggttgcagctgagttgaaagtgccgctggtggataactggaaacactttatacgcgcggacggcggcaaagatacagaccgggcgctgatccaatccggactgatagatccctccggaaatcatatgacgccaaaaggcgccagaatcttaattgaaggcataaaaaatgggcgggttttggaacgctgacgccgtcagctgcctaaaccgttttgcttctgattcataggctgtagaaaaaacatctttttggaggcgattgctatgaaccgcggtttccctccgcaatatcctgtatgcccgcctcctcgggtgaatgcggggtactggtacgcattttttgttgtgctgctcgtcgtcattctcgtcctgggcggtctgtattggttcaatatatagcagccgtcctcttaaacacctctattttaggggtgttttttgttgaaagtggtagtaatgcgcataaccgaagtgatataatatcagtcatctgagtaaaaaaaggaaattcgcccgggaatttttttctgtttaagaagaaacggaaataatgtgtccgagcgatcttcttttgatttcgttttcaattaactcgataaattcacggctcaaattcatttcattggctttgaaataagattctattagtaattcatcagaaagctttctcatgccggggacccaattaatgggagtggcacctccttataattgtaatcaatcatcagacgcaagcatatgatggaaggttgcgtttcaatcatggtgaggttatctttaatctaccatgaaatacaaataagaacaatcgttctgttatccacactcgtaagtggataacttgttagtatcttgtttataatttggataaatccggatgtaataagagtggataatgtgtgtaattttatccacaactggtgaagaaacccaatttttgtcgaaatttttttactgagtccgactttgtttttaaatctgacaggtttcgacatatagatgatagaaagaaaaggaagggtgcgggttttgttaaaaaagttttttttacctgacgaatttgtgaaaaatatatttcatatcacaccggaaaagctcaaagaacgcaatgtgaaagggattattacagaccttgacaacacgcttgtggagtgggacagaccgagtgcgacacctcgattaatcgagtggtttgaagaaatgaaggagcacggcattaaagtcacgatcgtctccaataataatgaacgaagagtgaaattattctcggagccgcttggcataccgtttatttataaggcaagaaaaccgatgggacgcgcctttaaaagagccgtcagcagcatggatctgaaaaaagaagactgtgtggtcatcggcgatcagctgcttactgatgttctcggcggaaacagaaacgggtatcatacgatcctcgtcgtgcctgtcgcttcctctgacggagtcatgacgcgctttaaccgccggattgaacggagaatattgagttctttgaaacgtaaaggccatattcagtgggaggattagaaatggaaaaggttgtttgcatcggctgcggagtaacgatccagaccgagaataaacaaggtctcggatacgcgccaaaggcatcgctcacgaaagagaatgtcatctgccagcgctgcttcagactgaaaaattacaatgaaattcaagatgtttcattaacggatgatgactttttaaatatcttgcacacaatcggcgatactgactctcttattgtcaaagtcgttgatatttttgattttaacggaagctggataaacgggctgaaccgctttgtcggcggtaatccgatcattcttgtcggtaataaggccgatatcctgccgaaatccgtaaaacgggaacggctcgttcaatggatgaaacgcgaagcgaaagaatacggcttaaaaccccttgatgtctttttaatcagcgcttcccgcggacaagggatgaaggaagtcattgacgccattgaacattatcgcgaagggcgcgatgtgtatgtggtgggctgtaccaatgtcggcaaatccacatttatcaaccggattattaaagaggtctcaggggaagagaatattattaccacctctcaatttccgggcacgacgcttgacgcgattgaaatcccgctcgatgacggatctgcgctttacgatacgccgggaatcattaaccatcaccagatggcgcattacgtggacaagcgtgacttaaaggtgctgacaccgaaaaaagaactgaagccgcgcacttttcagctgaatgaaaaacaaacgctttatttcggcgggcttgcccggtttgactatgtatcaggcgataaaacggcgtttgtctgctatatgccgaatgaattgatgattcacagaacaaagcttgaaaatgctgatgccttatacgaaaagcatgcgggagaactgcttaccccgcccggaaaagatcatttggatgaatttccggagcttacgccccacacgtttacgattaaagaaggaaagacggatatcgttttttccggtctcggctgggtcacggtgcagcaagcagataaaaaaataacggcatacgctccgaaaggcgtacacgtatttgtccgccgttcattaatatagagagaaggggagagggagcatgaaacaattgtacggagtaatcggtaatccgatcgggcattcaatgtcacccgatattcataacgcggctttgcaagataagaacatcaacgggcagtattttgcgtttcaggtggaacctcatcatctcaaggacgccgttaacggaatcaaggcgcttggcatctgcggagtgaacgtcacagtcccgcataaagtcgcgatcatggagcatctggatgaaatacatgaaagcgcgaaagtactcggggccgtaaataccgtcaaaagagagggagacaggctcatcgggtataatactgacggagatgggttttataaatccttagtcaaagtattggacaaaccgatatcagagctctccatcctcatgattggggcgggaggagcggcaagagcgatttttacgacgatcgtccgcggagagccgaaacaatttgacgtttgcaaccgcacgccggaaaaagcggaaagcctgattgcggctgctccctcttttcagcagaaacgcgcccttactttaaaagaagctgaaaatcagcttgaacaatatgacgtcattattcatacaacatctgtcggcatgtatccgaaaacggatgccgtgccgctctcattggaacgggccaaaacgggcgccatcgtttgtgatatcgtatacaacccgattcaaacggcgttcttaaaagaagctgaaaaaagaggtttaacaacccttgacggtgtcggcatgtttgtggaacaggccgcactgtctttcaagctgtggacggaacaagagcctgacagcggcttaatgagagcgattgttgaaggaaaactaggaggaacacaatgttaacaggaaaacaaaaacggtttttgcgttcaaaagcgcatcatttaacgcctatttttcaagtgggaaaaggcggagtcaacgaaaacatggtgaaacagattgccgaggctttagaagcaagagagctgattaaagtcagcgtgcttcaaaactgcgaagacgataaaaatgatgtcgcagaagcccttgtgaaaggcacccgctcacaattggtgcagacgatcggaaatacgatcgtactgtataaggaatcaaaggaaaataaacaaatcgagcttccgtaaggtggttgacatgaagaaaatcggaatattcgggggcacatttgaccctccgcacaacggacatcttctgatggctaatgaagtccttcatcaggcggagctcgatgagatttggtttatgcccaataaaatccctccgcataagcagaatgaagactttacagacagccggcaccgggtggagatgctgaagcttgccatcagctctaattccggctttaagcttgagcttgcggaaatggaccggaaaggcccttcttatacctatgataccgtccgtttactgaaggagcggcacccgaacgacaagcttttctttattatcggggcggatatgattgaatatctgccgaaatggtacaaactggacgaactgctcacgctcattcaatttatcggagtgcggcgcccggggtatcatattgagaccccgtacccgctgctttttgccgacgttccggaatttgacgtttcgtcaacgatgctgagagaacgtctcaaagcaaaaaagccgacgcaatacttaatgccggataaagtgaggcagtatatagaggagaatgatttatatgaatcgtgaggaagcacttgcctgcgtcaaagaacagctgaccgagcatcgctacatccacacaatcggcgtgacagatacggcggttattctcgcaggccggttcggagcagacccgaaaaaagcagaaatggctgctatttttcatgattatgcgaaattccggccgaaagaagaaatgaagcagatcatcgtgcgggaaaaaatgccggctgagctcttggattacaatgccgagctgtggcatgcccctgtgggagcgtatttggctgagaaagaagcggggatcactgatcctgagatcttggatgcaatccgctatcacacgtcagggcgtcccggaatgacccttttagacaaagtcatttacgttgcggattacattgaacccggacgccatttccccggagtggaagaggtgcgccgtctggcggaaacagatctgaacgaagcgctcatacaagcaatgaaaaatacaatgatatttctgatgaaaaaaaaccagccggtctttccggagacgtttgcaacctataattggctggtgtctcaaaattgacaggaggaatttaaagaatgaatcaagcttccgtattaaaaatcgcggcaaaagcatgcgacgataaacgtgcagaagatattttagcgctggacatggaaggaatctcacttatagcggattactttttaatctgccacgggaattctgataagcaggttcaggcaattgcgcgtgaaattaaagatcaggcagaagaaaacggcattgatgtcaaaaagatggaagggtttgatgaggcccgctggattttagttgatctcggcgacgtcattgtccacgttttccataaagatgaaagaagctactacaatcttgaaaagctatggggcgacgcgccgctcgcagagcttgaactcggcttgaactcatgatttaccaaggcttcgccggcgtatatgacgagttaatgtcacatgcgccgtatgatgaatgggcgggctggatcgaagcgtctcttccggaaaagggaagggtgcttgatcttgcctgcggaaccggagaaatatccatcaggcttgctgaaaaaggctgcgaagtcacggggattgatttgagtgaagatatgctgagctgtgcccagcagaaaaaaacgggaaagccgattctttttctccagcaggatatgagagagctttccggttttgaagaacagtttgatgccgttgtcatctgctgtgattccctaaattacttaaaaacgaaaaatgatgtcttaagcaccttcaaaagtgtttttcaagttttgaaggagggcggcctgcttctgtttgacgtccattccccatttaaaatgacggagctttttccggacagcacccatgcggatcaggatgagcagatcagctatatctggcaaagctttgccggcgatgaagagctttctgtcatccatgatatgtcttttttcgtatggaacggacaatcttatgaccgctatgacgagacgcatgagcaaaaaacattttacattgaagaatatgaacaaatgcttgcagagaccggatttgaactgaagaaagtgacggctgattttacagaccggcctccttcaacagagtctgaacgtcttttctttacggcaggcaaaccaaaaaccatcgtttaaacggaacgatggtttttaaaatgcattttttgcgattggcgcgataaagctctttatggcatactcatttacacgtgaaattgcttcttcactaacgatatatcttcatcgtatttgtcatgtgtacgctgaaagacacggttgaacatatcctgaacaccgctttcgagagccttcagtccttctccggtgacgccgccttttacgcatactttttcctgcaaggcgggaagcgtgtaatgccctgtttccagaagctttccgagaccgacaagcatttccgtcgacattatcacggcttcttctttggtgatgtccgtttcttccactgccgcgtcaataaagcgctgaacgagataactcataaaagcgggcccgcagctgacaatgtctgacgccgctcttgtaatgccgctgctgatttccacaggttttgaaatatgagtgaacagcgtttgaatatccgcttttgcagcctcgctgcagcttttgccgaacgtaacaagcgagacgccggccaaggcgcggttcgtaatgctcggaatgacgcgggccgtctgacacggaaccgtatgttcaatctgatccgtctgaacgggactggtaatggagattaaaatgtgatctttccgtaaatgcggtgtgagtttcttcagcaaaggatatatatccagcggttttacacaaatgaatattatttcattatcctgtacgagcttttcctgatcctcggtgacatggatgccgctgaaacgttcttttagttttaatgctttttcgattgttctgtttgtgatggtgatatgtgagggatcggcagcgtttgattcgataaacgattcaatcaggatcgttcccatgtttccggtgccgataaagcctattttcaatgaattcccctcctttttcccttaatcctctaaaccttatgcggggaggcaatgcaatatgacgaaagcgatgatgacggagcggctgcggcggaacctgaaaattctgggcgcttgtcttgcggcaggggcggtttttatctgtatttggctgtttcgttctgacaaggaagagccggtcaaacagcagtccgtgctcggccaaacagcctcagcatccgtcgcggacaaaaaagacaccgcagccgacaagattatgattgatgtgaaaggcgcggtccgaaatcccggcgtatatgaaatgaaagcgggagacagggtgacgcaagccattgaaaaagccggcggcctgaagaaaaaggcggatgaattgaatgttaatttagcagagcagctgcaggacgggacgattgtttatattccgagtgaaggcgaagaggagaatcgcccgaaaacagcggcgggtgaaaaggagaatgcagctgtcaatatcaatacggcatctctggacgaacttcaggcaatttccggggtggggcagaaaaaagcggaagcgattatcgcctaccgagaagaaaacggacggtttcagactgctgaagatttgatgaatgtatcaggctttggagagaagtcatttgagcggataaaaacttccattacggtaaagtgaattgacggttttgcttaaatctatgtaaacttagaaaagcaacaagactttttggagggaacacttgtggaacgaatctcatggaatcaatattttatggcgcaaagccatttgctggcgctgagaagcacatgtccgagactgtcagtcggggcaaccgtagtcagagataagcggatgattgccggcggatacaacggctcaatcgccggcggcgtccattgcgctgatgaaggatgccttttaatagataatcattgccagcggaccatacatgcagagatgaatgcgattctgcaatgttctaagttcggtgttccgacggagggcgccgaaatttatgtgacgcattatccttgtattcaatgctgcaaatcaattatccaggcaggcatcaaaacggtttattatgcggaagattacaaaacacagccttatgcaaaagagctgttcagccaagccggagtcaaggtggagcaggtcgaacttgatgaaatgatcatcgatctgaaaaaccgcgaaaaattgtcttttgtagcaggtctgattcagcaattatctgatgcgggggttaaggcagatgaactgaaaaaaattcatgaacaggccaatgagctgtttaccagttacgtataaatgaaatataaataccttcttctgcctctggcggcggtttctgcaactgcgggaattgccgccgctcatgtcttctgggttctgctcctttttcttctgtatcttctctttattattgtaaaaacaaagcagtatgctccggttatcgtctgcctcgtttctttttgtctttatttctttctttatacggtttgtgacgctgcgaatgtaacgcgctatcaggccggcagttatactgaacaggccgtcatcactaatattccgaaggttgacggagcgaaaatgtcagctgttatccgtacacatgacaaggaaaaatgggcggcttcgtacaaaatccgttctcttgaggaaaaaagactcattgaacagcttgaaccggggatgcgctgcacgtttacaggctctctggaacagcctgcacatgcgacggttcccggaggttttgattataaggaatatctttactctcagcagattcactggttattttccgtgacttccattgagcagtgtgaaaaatccaaacagccgctgtttaaactgctgaacatcagaaaaaatttgatttcgatcattcggaatcacgtgcctgaatcttccgccggaattgttgaagcgctgaccttaggtgaaagattttctatagaggacgatatactgagtgcatatcaaaatttgggagtcgttcatttaatggcgatttccggaatgcatgtcggtcttattacggcgggattattttatgctctgatcagaatcgggctgacaagagaaaaggcgggaattttgctgctgctgtttttgccggtgtatacgctgctgagcggtgccgccccatccgtattgcgcgcatccctcatgctgggattttatatcgccggaactcttgttaaacgcggcattcattcctctgctgcattgtccctgtcttatctgctgctcctgctgtttaatccttacttcctttggcaggcgggcttccagctttcctttgcggtaagcgcctctttaattctgtcatcctccattttaaagaaagcaggggaaagcagacttgccgggcttgcgatggcttcattgattgcagagctcagctcacttccgtttcttctctatcattttcagcagatttcacttgtcagttttccgatgaatatggtgatggtgcctttttatacgttatttgtcattccggtttctgtcatcggtttccttcttcttttactctcaaggcagatgggagaatgtttgtttggtatgtttgaccttgtgatgaagcctgtgcatgatttcattacatatgcggcatccgttgatttatttactatgattgtgtcaaagcctgactttctttcccttcttctgcttgcggtttccgtttttacgctttttgcggctttggaaaagggaggttttttaaaactcaggaagtcggctctttttttctgcgcggttttggcttatttaatatgccgtccgtatttcagtccatggggagaaacggatatgcttgatatcgggcagggagactcactgtttataagtgcgccgtaccgcaaagggaccgtaatggttgatacagggggagtgattgcttatcccggagaatcatggaaagaaaaacgtcacccgtattctatcggcgagaaggttttgattccatttttaaacggaaaaggggtgaaaaagctggatgcactgattttaacccatgcggatcaagatcacatcggggaagccggagtgttaatcaaaaatcatagagtcaaacggttaattgtccccgtaggattcgtaaaagaaccgaaagatcagaacatattaaatatggcgaaagaaaacaacattcccgttgccgaagcaaagcggggcgacaccattacagccggggatcttcagtttcaggtgctgtctccggagtcgtctgacggaaggagtaaaaatgattcgtcactggtgctttggacggcttttggcggagtgagctggcttttaacgggagatttagaatcggacggcgaaacagaagtgctgaaaacgtatccgaatctgaaggctgatatattgaaggcgggtcatcacggcagcaaaagctcaacgagtgaagcctttttgaagcagcttcagccggaagcagcgctgatttcagcaggaaaagagaatcgataccatcatccgcatgaagaagtgctggatcgtttgaaggcgtactctgtcaatgtgcttcgcaccgatatcagcggaacgattcaatacagatttaaaaaaggcgccggaacgttttccgtcttccctccatatgatatagaagaaaccagggcgcaagaagtaaaaaagactgccgattgacagcagcccggaatgcggctaagagccgataagatggatggctgttgccatcacgaacaaaaaggcgaaaaatccgaaggacacgacaaaaccgacagctgagtcaacagcatcatttcgtttgctttgaacgtttttttcaaaatcattcaatttcatccctcctgacttccctaagtatactggaattgttttgaaaaatctagaagtgatggtaacgttttctgttcttgtgattatcgcctttttacaagcagacccgggagcttgtgaatcaggcgtttattataaatgaggaagctgtccttaaagcttcctctttactaattgccgaactcaatttaggatagaaggggatcaagaaagagaggaagtcatacgatcatggtatttgatgtttggaaagccctgaaaaaaggggatgtccgctccgtttattgtttatacggaaaagaaacgtatctgctccaagaaactgtcagccggatcagacaagctgtcgttgatgaggggacaaaggattttaacctgtctgtttttgatcttgaagaagatccgcttgaccaggccgtaaccgatgctgaaacgtttccgtttatgggagagaagcggctggtcatcgtaaaaaatccgtcttttttaacaggggaaaaaaagaaagaaaaaatagagcataatacagccgctctggagacttatctgaaggagcctgcgccttacacggtctttgtgattgtggctccgtatgagaaactggacgaacggaaaaagctgacgaaagcgctgaagcaaaaagcccttatgattgaagctaaggagctgaatgcaaaggagacgacggattttacgattaatctggcgaaatccgaaaataaaatgatcgatacagaagctgccgagcatttggttctgcttgcaaacggccatctgtcttccatatatcaggaaatacaaaaactctccgcctacaccggtgacagacatgagatcacacttgaagatgtccgtgagctcgtcgcaagaagtttggagcagaatatttttgagctgatcaacaaaatcgtgaaccgaaaacggacggaaagtcttcaaatattttatgatcttttaaaacaaaacgaagaaccgatcaaaattatggcgctgatcgccaaccaattccgtctgattatgcagacgaagtattttgcgggacaaggatacggccaaaagcaaatcgcttccaacttaaaggtgcaccccttccgggtaaagctggcgatggatcaggcgaggcttttttctgaagaagagctacggcgtattatagaaagactcgcagtgatggattatgaaatgaaaacggggaaaaaggacaagcagctcttgctggagctctttctccttgagcttctccggactgaatgaaaaaaacgatccccgttaaagggatcgtttttgtattatgcagaaagtccgttcacttgtttcgcaagtctagatttgtatcgagctgcggcatttttgtgtacaagacctgttttcactgctttatcaatgcgtttcgctgcttcagaaagagcagttttcgctttatccgcttcgttgttagcaacagaagcttcaacttgtttgattgcagtacgcatagcagatttgattgtcgcgttatgagcgcggcgttcgttgtttgtttttgtacgtttaatcgctgatttaatgtttggcatgtgtttcacctcctaagatacaacctgtagcacagtgtcttaaggttaaatcttcttcacaatagaacaaattgtattctatcaaacagaactttagattgcaatataaatgtaaagtatttttcgttgatgggtaaattcgcatgattcgttttgtaaatggccacactatgtaccacgatgattgaaggaggtcttccctgtgaaaaacaacgaactggatgtcaatcaatttctgatacggacggatttagcggtagaaacgaaacaggcggtaaaagacggacaagccggtcagaaaaaagaaataaacgggtttattgaaaaagaacgcgacaagggcggcattaaagtcagaaccgtcgatattaccaaagaaggcgccgagctatcggggaaaaagcagggacgctatgtcacgatcgaggctcaaggggttcgggaacacgactctgacatgcaggaaaaagtaacggaagtgtttgccgaggaattttccgcctatctgtcggcattaaagattccaaaggatgcaagctgtttgatcgtcggtctcggcaactggaatgtgacgccggatgcgctcggccctctcgtgaccgaaaaccttcttgtgacaaggcatctgttcaggcttcagccggaaaacgtacaggaagggtacaggccggtcagcgcgcttgctcccggtgtgatgggattaacgggaattgaaacgagcgatattattcaaggtgtgatcaaagaatcaaagccggattttgtgatcgcggtagacgctcttgcggccagagccgttgaaagggtgaacacgaccatccaattttctgatacgggcattcacccgggatctggcgtcggcaataagagaaaagaattaagcaaggaaacgctcggcattcccgtcatcgcaatcggggtaccgactgtcgttgatgcggttacgatcgcaagcgatacggtggattatatattaaaacatttcggaagagagatgaaagatgacagcccgtcaagatctctggtgcccgccggaatgaacttcggcaaaaagaaggtgctgacagacgaagaccttcccggagaaaaagaacgccaatcctttctcggtattgtcggcacgctggacgaaaacgaaaaacgccagctgattcacgaagtgctttctccgctcggccataatctgatggtcacgccgaaggagattgacacctttattgatgatatggcgaacgtacttgcaaacgggttaaacaccgcccttcatgaaaaagtgtcacaagataacaaaggttcttataatcattaaaatggttctacctcctctagcttgttcatagagtaattactagacaagcgctggagggattcaaatcatgagaaaaaaacgcagaaaccgtcaaattgtcgttgcagtaaacggtggaaatgcgctcaagggcatgtttttgtttatgacaagccttatcgttattttcgtattatcgggtgtgctcacatcgcttcgccctgaactgaggctttcttcggattctcttcacggaattgccggagaacttccgggtgacgcgtttgcacacctcctcggcatggaaaatcattatttcgcctcagagcttcctgaaaaagactcttttcagctgtcacggctttccttaaaactggcgacaagcattaatatggaagacccgcggagtttcttgggacgtgagctgccgggatttgcccaatatgatacggagatccttctggcggggcaggggacggattatacgaatatgccggctgaatctccgccgccgtcaaaggtgatggaaaaagaaaaagaagtgaatctggcagaaatcgaaaacaaaacgaaaaaagaagaaacggcgccgccgaaacattcaacaggcagcaaaaaagtcgtttttatttaccacactcataataccgaatcctatcttcctctgttaaagggggaaacaaatccggataacgcccgccattcgaaggccaatgtcacgcttgtcggagatatgttcggaaaagcgcttgaagcgcaaggtgtaggagcgaccgtagataaaaccgacattcaggcccgcctgaacaaagacggtttaaattatgcgcgaagctacgacgaatcaaggccggtcgtaaaaagcgcgctcgccaaaaataaaaacctgcaatataccatagacattcaccgggattcccgccgcaagaaaaatacgacagccgacatcaaaggaaaaagctatgccagagtcgccatcgtcgtcggcaaaaaaagcgctaattttgaagaaaactataaactcgcaagtgaacttcataagctgatggagaaaaaataccccggcttaagcgtcggtgttttatcaaaaggctctccgggagataatggagtatacaaccaagatttaaacgaccggtcgcttctgctggaattcgggggcgtggataacaatcttgaagaactgaggcgcgcatcagatgccgtggccgatgtgttcagcgaactgtactgggatgcagaaaaggtcagctcgcaatcaggagagaagaaaaaacaatagaaatcaggtgattcgaatgatccgttttaccggcaaatgcctgctgatcgccattgtcatgtttttcggcgtattgttcggcatgcagcaggcaaacagcggaatgcttgatatgaaaggatacaaagacccttccttaaaaggagcattcacgctcggcggcggagaaggacaggaaaaagaagcttccattttggggcaaaccgttacggcgaaagatctggaagaaaaacaaaaacagctggaacaggcggaaaccttcaacctgttttcaaaagccggggaaaccctttcaaataccgtgacggactcggcgcaggcgatgtatgagtgggtttcaaaactgaaccgttagcattgatgaagagaaaagcggatgattccttaaaggaagcttttctctttcttgttttaattgaatgtttacaatcctattgatataatctaagctagtgtattttgcgtttaatagtaggagtgatagattgtgacagataaagaaaagcgtttagagaggcagtcaagaatccggaatttctccatcatcgcccacatagaccacggcaaatcgaccttggcggatcggattttagaaaaaacatcggcgatcacccagcgggaaatgaaagaacaattgcttgattcaatggaccttgaacgcgaacggggaattaccatcaaattaaattccgttcagctgaaatacaaagcaaaagacggagaagaatatatatttcatctcatcgacacgcccggacacgtcgactttacatatgaagtatcgcgaagcctggctgcctgtgaaggcgcgattctcgttgttgatgcggctcagggaatagaagcgcagacattggcgaacgtctatctggcgcttgataatgatcttgagattcttcctgtcattaataaaatcgatcttccgagcgcagagccagaacgtgtgcgtcaagaggttgaggacgttatcggccttgacgcttcagacgccgtcctcgcttcagcgaaagcgggcatcggcatcgaagacattttagaacagatcgtagaaaaagtgccggcccccgcgggagatccggaagctccgctgaaagcgctcatctttgactcgctttatgacgcgtaccgcggagtcgtcgcgtatatcagagtcgtagaaggaacggtcaaaccgggccagaaaattaaaatgatggcaaccggaaaagagtttgaagtcatcgaagtcggcgtcttcacgccgaaagcccagccggcagacgaattgacagtcggtgacgtaggctatttgacagccgcaatcaaaaacgtcggcgacacccgtgtcggtgatacgatcacgagcgcggttaagcctgcggcagaagcgcttccgggctaccgcaaactcaatccgatggtatactgcggactttatccgattgacacagccaaatataatgatttgcgcgaggctctggaaaaacttgaattgaacgattcatctcttcaatacgaggcggagacgtcacaagccctcggcttcggcttccgctgcggttttttaggaatgcttcacatggaaatcattcaagagcggattgaacgggaatttaaaattgaccttatcacgaccgcgccgagcgttatttatgacgtttatatgacggatggcgaaaagatcatcgtggataacccgtcaaacatgcctgacccgcaaaaaatagagcgggtggaagaaccttatgtcaaagcgacaatgatggttccgaacgattatgtcggtgcggtgatggagctttgccaaggaaaacgcggcaattttatcgacatgcaatatttagacgcaaatcgtgtcagcattgtctatgacatgccattagcggaaatcgtctatgagttttttgatcagctgaaatcaagcacaaaaggctacgcgtcctttgattacgaactgatcggctacaaaccgtctaaacttgtcaagatggacattatgctgaacggagaaaaaatcgacgccctttcatttatcgtgcatcgcgattacgcgtacgaacgcggaaaagtaattgtggaaaaactgaaagagcttattccgcgccagcactttgaagtaccgattcaagcggcgatcggacagaaaatcgtggcccgctcaaccattaaggccatgcggaaaaacgtccttgcaaaatgttacggaggagacatctcgcggaaacggaagcttcttgaaaaacaaaaagaaggaaaacgccggatgaagcaggtcggctcagtagaagtgccgcaggaagcgtttatggccgttcttaaaatggatgacagcccgaaaaaataacggaagccgccgcagtcccgcgctgcggcttctttctgtaaagaagaaggtgtttcaaaatgaaatcagcttatattcatattccgttttgtgagcatatctgccactattgcgatttcaataaatattttattcagagccagcctgtcgatgagtacttaaactcactcgaaaaggaaatgataaatacaatagaacggacgggacgccctgatctccgcacgatttttatcgggggaggcacgccgacatcgctctcacccgtccagctggaaaaattgatggattccattcaccgcgtgctgaagccttctgacggactcatagaatttgccgcggaagcgaatccggatgatttgtctccggaaaaattaaaaatcctgaaaaatgccggtgtcaaccggctgagcttcggtgttcaaacctttgaagatgagcttttacaaaaaatcggaagagtgcataaacaaaaggacgtattcacttcctttgaacgtgcgagggctctcggcttcgacaacatcagtctcgatttaatgttcggcctgccgggtcagacgctggccgatcttgacaattccgtcaaaacggctttgtctcttgaggcggagcactattccgtttactcgctgatcgtagagccgaaaacggtgttttataatttaatgcaaaaaggccgcctgcatctccccgcgcaagaacaagaggccgagatgtatgaaacagtcatgaggcagatgagtgaagcgggcatccgtcaatacgagatcagtaactttgcaaagcccggatacgagtcgcagcataatctgacgtattggagcaatgaagagtatttcggttttggcgcaggcgctcacggatatatcagcggcacgcgcaccgtcaacgccgggcctgtgaaacattacatgcagctcatcgaagaaaaggggctgccttaccgtgacacgcacgaggtgacacgtgaggagcagattgaagaagaaatgttcctcggtctcagaaaaatgtccggcgtacaaaagcaagcttttctcgataaattcggacgctcggtcgacgaactgtttcccgatgttctcaaagatttaaccgaaaaaggcctgatctgtgacacggaagaatcggttgcattaacgcatgagggcaaattattaggaaatgaggtttttggcgcttttttgggtgagttataattgacatttttcttttggtttgttacttttgatatagaattagcactcgctgaccttgagtgctaacaggggtgatgatgatgttaacaaatcgtcagctgttgatcctgcaagtgattattaatgattttatacaatcagcgcagcctgtaggatcaagaactctttcaaaaaaagacgagattacattcagctctgcaacgatcagaaacgagatggctgacttggaggaattgggctttattgaaaaaacccattcatcctcaggacggattccgtcggaaaaagggtacaggtattatgtcgatcatttgctgtcacccgtcaagctgacaaaaaccgatctggatttaattcactcgatatttaaagaaaaaatcttcgagctggaaaaaacagtccaaaaatcagcgcaaatcctgtccgacctgacaaactacacatcgattgtcctcgggccgacgctgagcgagaactatcttaaacagattcaaatcgtaccgatccagccggataaggcggtcgccatcctcgtcacgaacacggggcatgtcgaaaaccgcaccatcaatttcccggctaaagtggatttggccgatattgaaaaactggtcaatatactaaacgatcgattggcgggcgtgccgatggacgaactgaatgagcgcattttcaaagaggttgtcacatatttaaggcagcatatcgccaactatgacagcatacttgaatcgctccgctccacattccatccggcggcccacgttgagaaattgtttttcggcggaaagatcaacatgctgaatcagccggagttccatgatattgaaagggtccgctcgctcttatctttaattgaaaaagagcaggatgttctgaagctgtttcagtcatcaaaagccgggatttcaatcaaaatcgggaaagaaaacgactacgaagaaatggaaaactgcagcttaatcacggccacctatacagttgatacgaagcagatcggatcaatcgccattatcgggccgacgcgtatgaattattcaagagtcgtcagcctgctgcagcacgtgacttcggacttgtcaaaagcattcacaagtttgtatgatgaataagggaattttggcaatcattttcagtcatctttttacagcatttgagggaggtgaacacaatgtcagaagaaaaacaaaccgcagaacaggttgaagcagcagaacaagaagaagtgacagaacaggcagaacaagccgcttcacaagagcagcatgaagaaacggcaggtcaggaagaagcccttcagcaccaaattgatgaattgcagggtttgcttgatgaaaaagaaaacaagcttttgcgtgttcaagcagactttgaaaactataaacgacgcagccgccttgaaatggaagctgctcagaaataccgttctcaaaacgtcgtaacggaaatccttccggcgctcgacaactttgaacgggcgttacaggtagaagctgaaagcgagcagacaaaaagcttgctgcaaggtatggaaatggtccgccgccagctgatggacgcacttgaaaaagaaggcgttgaagccatcgaagctgtcggtcaggaatttgatccgaaccttcaccaagccgtcatgcaggtggaagatgaaaacttcggcagcaatattgttatcgaagaactgcaaaaaggctacaaactgaaggatcgcgtcattcgtccttcaatggtaaaagtgaatcaataactacatagcaggaggtaattcaaagtgagtaaagtaatcggaattgacttgggtacgacaaactcatgtgtggcagtgcttgaaggcggagagcctacagtcatcgccaacgctgaaggaaaccgtacgactccgtcagtcgttgcatttaaaaacggcgagcgccaagtaggggaagtggcaaaacgccaatccatcacaaaccctaacacaatcatgtctgtcaaacgccatatgggtactgactataaagtggaaatcgaaggaaaagactacacgcctcaagaggtgtcagctattatccttcagcatctgaaagcatatgctgaaagctacctcggcgaaacagtttcaaaagccgttatcacggttcctgcatacttcaacgatgcagagcgccaagcgacaaaagatgccggtaaaatcgccggtcttgaagtagagcgtattatcaacgagccgactgcagcagcgcttgcatacggacttgataaaacggacgaagaccaaacaattcttgtttacgaccttggcggcggtacgtttgacgtatctgttcttgaacttggcgacggcgtgtttgaagtccgttcaactgccggtgacaaccgtcttggcggagacgactttgaccaagtcatcatcgatcacctcgtagcagaattcaaaaaagaaaacggcattgatctttcaaaagacaaaatggcgcttcagcgtttgaaagatgcggctgagaaagcgaaaaaagatctttccggcgtttcatctacacaaatttctttaccatttatcacagcgggagaagcaggtcctcttcaccttgagctgacactgacccgcgctaaattcgaagagctttccgctcaccttgttgagcgcacaatggctcctgtccgtcaggctcttcaagatgcggatctttctgcgagcgaaatcgacaaagttatccttgtcggcggatcaacacgtattccagccgtacaggaagcaatcaaaaaagaaacgggtaaagaagcgcataaaggcgtaaaccctgatgaagttgtagcgctgggtgcagcgattcaaggcggcgtcatcacgggagacgtaaaagacgttgttcttcttgacgttacaccgctttctctcggtattgaaacaatgggcggcgtgttcacaaaactgatcgatcgcaacacgacaattccgacgagcaagtctcaagtattctcaactgcagctgacaaccaaacggctgttgacattcacgtgcttcaaggtgagcgcccgatgtctgccgacaacaaaacgctcggccgcttccagcttactgatatcccgcctgcaccgcgcggcgtaccgcaaatcgaagtttctttcgatattgacaaaaacggtatcgtaaacgtaagagcgaaagacttaggcacaggaaaagaacaaaacattacaatcaaatcttcttcaggtctttctgatgatgagatcgaacgcatggtaaaagaagcggaagaaaacgctgacgctgatgcgaagagaaaagaagaaatcgaagtccgcaacgaagctgaccagcttgtgttccaaacggaaaaaacattaaaagatctggaaggcaaagtggacgaagagcaagtgaaaaaagcaaacgacgcgaaagacgcgctgaaagccgctatcgagaaaaacgaaattgaagacatcaaagcgaaaaaagatgagcttcaaacaatcgttcaagagctttctatgaagctttacgaagaagcggcgaaagcgcagcaggctgaaggcggagcaaacgctgaaggcaaaaaagcggatgacaacgttgtcgatgcggagtacgaagaagtaaaagacgacgaaacgaaaaaataagttctttcccgcttggctataggcggaagaacacacagcatattctgattcaacagacagaaagtcaaagtcaggcatctcttggctttgactttttttcttgcccgggataaaaggaattgaaaaaacataattcaaaatgatacaatctaatttatgtgagaaattcgggagagtgaagcgagatgagtaagcgtgattactatgaagtgcttggggtaagtaagagcgcttcaaaggatgaaatcaaaaaagcctatcggaagctttcaaaaaaatatcatcctgatatcaataaagaatccggagcagatgaaaaattcaaagaggtaaaagaagcgtacgaagcgctctcagacgaccaaaaacgcgctcaatatgaccaattcggccatacagaccctaaccagggattcggcggcggtttcggaggcggcggagacttcggcggcttcggtttcgatgacatcttctcaagcatcttcggaggcggcacgagacgccgtgacccgaatgcgccgcggcaaggcgcggatctgcagtatacaatgaccctgtcatttgaagacgcggctttcggaaaagaaacgatcattgaaattccgcgcgaagagaattgcgaaacatgtaaagggtctggcgcgaagccgggaacaaagccggatacgtgctcgcactgcggaggttctggccagctgaacgtcgaacagaacacgccgtttggcaaagtggttaaccgaagagtctgccaccactgtgaaggaacaggaaaaatcatcaaaaacaagtgttctgactgcggcggcacgggcaaagtgaaaaaacggaaaaaaatcaatgtcacgattcctgccggtgtggatgacggacagcagctgcgcgttccgggccaaggtgaaccgggcgtaaacggagggccttcgggagatctgtttgtcgtattccatgtgcgcgcccacgagttctttgagcgcgacggagacgatatttattgcgaaatgccgttaacgtttgcccaagcggcactcggagacgaagtggaagtgccgacgcttcacggaaaagtgaaattgaaaatacctgccggcacacaaacaggcacgaaattcagattaagaggcaaaggcgttcagaacgtccggggctacggacaaggcgaccagcacattgtcgtccgcgtcgtcacaccgacgaatctgacagacaaacaaaaagacatcatccgcgagttcgctgaagtcagcggaaatctgccggatgaacaagaaatgagtttctttgacaaagtaaaacgcgcatttaaaggcgagtaatgattggataggagttggtagttttgaaatggtccgaaatcagcattcacacaacacatgaagcggttgaacccatctcaaatattttgcatgaagctggtgcgagcggggttgtcatcgaagatccgcttgatttaatgaaagagcgtgagaatgtttacggggaaatctaccagctcgaccccaatgattaccccgatgagggtgtcattgtcaaagcgtatctgccgatcaacagtttcctcggcgaaacggtagacggcataaaagagacgattaataatctgcttttgtatgacattgatttgggcagaaacacaatcaccatttctgaagttaatgaagaagaatgggcgacagcttggaaaaagtattatcatcctgtgaaaatttctgaaaagttcacgatcgttcccacatgggaaacgtacacacctgttcatacagatgaactgattatcgaaatggatccgggtatggcattcggtacgggaacgcatccgacaaccgttctgtgcattcaggcgcttgagcgtatcgttcaaaaaggcgaccgtgtcattgatgtcggcaccggttcaggaattttaagcatcgcggccgccatgcttgaggccgaatcggttcatgcgtatgaccttgatccggtcgctgttgaaagcgcgcgtctgaatgtgaaattgaacaaagtgagtgatacggccgaagtgaagcagaacaatttgttagacggcatcacgggcgaacatgatgtcattgtcgcaaatattttggcggaagtgattctccgctttacatcacaggcgtacgacctgctcaaagacggaggccattttattacttcaggcattatcggccagaaaaaacaggaagtaaaagaagcgttggaaaaagccggctttaccatcatagaaattctgtctatggaagattgggtcagcatcatcgcgaaaaaataacagttagtaggtgtcacagcgtatgcaacgatattttatcgagctcacgaagcaggagatggacgaaactcctgattttcaaatcacgggggaagacgtccaccatatagcgaacgtcatgagaatgagtgcgggagaccggattatctgctgttcgaaagacggccatgaagctttatgcctgcttaaagaggtttctaaagatcatatatcatgcagcattgctgaatggacgggtgaaaaccgtgaactgcctttgaagatcaggatcgccagcggcctcccgaaaggcgataagcttgaatggattatccaaaaagggaccgagctgggggcaagtatgttcatcccttttcagggcgccagatccgtcgttaagctagacgacaaaaaggcaaagaaaaagcgggagagatgggcgaaaatcgcgaaggaagcggcggagcaatcgtaccgcaatgaaattcccgaagtgaaaaccgttcatacgttccggcagctgcttgaaatggcggagaatgtcgataaatgtgtcgttgcatacgaggagtcatcaaagcagggagaaacgggcgctttcgctgcggagctcaaaagccttccgcaaggttcgtctcttttaatcgtattcggccctgaaggcggtctgactgagtctgaagttcatcagctttcagaaaaaggcgccgtcttatgcggcctcggaccgagaattttacggactgaaactgcgcctctttacgcgttaagcgcagtttcctatcatacagagttattaagaggtgatcagtaatggcaactgttgcttttcatacccttggctgcaaggtcaaccattatgaaacagaagcaatctggcagctgtttaaagatgcgggttatgaacgaaaagaattcgaacagacagcagatgtatatgtcattaatacatgtacggtaacaaacacgggagataaaaaaagccgtcaagtcatcagacgggcgatccgccaaaatcctgacggcgtcatctgcgtaacagggtgctatgcgcaaacctctccggcggaaattatggccatcccgggtgttgacatcgtcgtcggcacgcaggatcgtgaaaaaatgctcggttacattgagcagtacagggaagagcgtcagccgatcaacggcgtcggcaatattatgaaagcacgcgtgtttgaagagctggatgttcccgcttttactgaccgcacaagagcgtcgttaaaaatccaagagggctgcaacaacttctgtacgttctgcattatcccttgggcgcgcggcctgcttcgttcccgcgatccggaagaagtcattaaacaggcgcagcagctggtggatgccggctataaagaaatcgtcctgacggggattcatacgggcggctacggcgaagatatgaaagattataatttcgccaagcttctccgcgagcttgatacacgtgtagaaggactgaagcggatcagaatttcatctattgaagcaagccaaatcactgatgaagtgattgaagtgctggatgcgtctgataaaatcgtccgtcaccttcatatcccgattcagtcaggatcaaacaccgttctgaaacggatgagacgcaaatatacgatggaatttttcgcagaccgtttaaataagctgaaagaagcgctgccgggtcttgccgtcacatctgatgtcatcgtcggtttcccgggagaaacggaagaagaatttatggaaacataccggttcattaaagaacataagttttcagagcttcacgtattcccttacagcaaacgcaccggaacacctgcggccagaatggaagaccaggttgacgagaacgtgaaaaacgaacgggtgcataagctgatcgcgctgtctgaccagcttgcaaaagaatacgcctccgattatgaaggagaggttctggaaatcattccggaagaggcgtttaaagagtctgatgaggagggcatgttcgtcggctatacggacaattacatgaaagtcgtcttcaaaggcacggaagatgtaatcggcaaacttgtcaaagtcaaaattcaaaaagcgggctatccgtataacgaaggacaattcgtccgcgtcgttgaggatgaaatgacccgaaacatgcgcatgtcttcataactgataaaaaaaccggtgccttcccgcatcggtttttttacggtttcggaggaatcagcctgtcaatcagccggtaaaacaaatgtgtgaacggcagaaacaataaggcggtgactacgttaaataacaggctgaaatgcgcaatcatctgcgcgggatcatcagacaggcgctccgtaaaacctgctgatgcggacaggaagggaaatacgagcagcacgccgagaatattaaacacaacgtgagcaccggcggtctgtctggcggcataaccgcctgaaacagcagccatgacggccgtgacgcatgtcccgatattagatcccagaacgacgctgaccgcttgttcaatgccgatcaccccttcgttcataaaactcatcaaaatgccgatgcagacggagcttgaatgaatgattgccgtcaatatcatgccgataaaaagagcggaccagctcgaatcattcacatgtcgcaaaacctccgcccccgccttcatttctgtcagcggaacggcgagccggctgaagcatgtgatgcaaaaaaagatgatgccgagaccgaggaagcttatgccgatctgcctgaacggatatttacggaggaggataaacacaaggcctccgataaaaagcacccaaatgagcacatccatctttatggctaaaaactccgtcgtaaacgtggagccgacattcgtgccgagaatcatcggaatggtccgtttaaaagataaagcgcctgcgctgacaaagccgatgacaatgaccatgaaggctgagctgctctgaagaaaaccagtgaatacgatgcttatgagaaaagctttcaaagggtggtcggtaaataagagcaggctcttctcaatttttgaatacgttaaggcgatcagcccctgcctgagcaggctcattccgagtaaaaaaatcaggataagtgcggtaaagagaatcagtatcatcaaatgaaacacccctttccatcattatatagacaagcagctttattcatgacggaaaagtgagctcgcttagttgacctgactgatggcttatattataatgtcaaagtacatgtttatatatgtatctttttaaaggtagtcgattggtgtattcggagggagggaaagagaatgtcaaaaacggtcgttagaaaaaacgaatcgcttgaagatgctcttcgtcgcttcaaacgcagtgtatcaaagacaggtactttgcaagaagcaagaaagcgcgaattttatgaaaaacctagcgtaaagcgcaagaaaaagtcagaagctgctagaaaacgcaaattctaaaagagggtggatttatgagtcttcttgagcgacttaaccaagatatgaagctgtatatgaaaagccgtgagaaagacaaactgactgtcgttcgaatggtgaaagcttcacttcaaaacgaagcaattaagcttaagaaagacagtttgaccgaggatgaggaacttactgtcctatctcgtgaacttaagcaacgtaaagactccctccatgaattttcaaacgctaatcgtttagatttagtagataaagttcaaaaagagctggacattttagaagtttatttaccgaagcagctttctgaagaagagctgcagacaatcgtaaatgaaaccatcgctgaagtcggtgcgagctccaaagcggacatgggcaaagtgatgagtgctattatgcctaaagtaaaaggtaaagctgacggcagcgtaattaacagacttgtcagcagtcaattatcttaattgacaagaaaaaagacatctttccttgagagatgtctttttttatacataaaaaaatgaaactaaagtacatttgttacgtatataaagaagaacgaaacgggaaggagggtatatttgccttgttccgaaaaaaaaccggaattgctgttgctctattgggcttatttgtattatctttattaggggttcaattgaacgcgaaagctgatcatccatcggtttatgtcatcccggttgagaaaaatgtcgaacaggggctcgcctcgtttttatcgcgttctttcaaagaagcgaaggagtccggcgcgtcacacattattcttgacatcaacacaccgggaggcgccgttcaatcagccttggatattgctgatatcatcggccgcgcggatgtgcctgttaccgcttacgttaataaacgggcgctttctgccggagcgtatatagcgcttcaggcagatgaaatctatatggcgccgggcggaaaaatgggtgccgcagccatcatcgacggaaagggaaacgcggcagacaaaaaggcccaatcactgtggcatgcagaaatggaggacgcagcggttaaaaacaaccgaaatccgaaatacgccctggccatggcagatcccgccattaatgcaaaggaagcgggcgccccaaagggaaaactgctgacactgatcgctgaaaaagccaaggaagtcggatattcggagggcacggtttcagaccttgatgctttatatacaaagctcggttttgacaaagcggatgttcaccatgcaaaagaaggtttcgtcggcaaactgggcagatggctgacaaatccgtttgttgtccccgtcttattaacgcttgctttgcttggtttgaccattgaattgttctcgccgggcctcgggataccgggtgccgtcggactgacggccatgctgctgtttttcaccgggcatatcgctgccggattcgccggctatgacagcgtattcttattttgcgcgggcttggtttttatccttttagagatatttctgcccggaggcataatcggtcttatcggtattgcaggcgtcatcgcgagcctctttctcgctgcgggcagctttaccgtaatggcggtttctctcttgatcgccattgctgtgtctattacagcctttatcatattaacaagggtgttggggaaacgaatgaaattctttaaaaaattaatattaactgattcaacaagcacggagagcggttatgtttcaaatcagaaccggacggagctgttgggaaaagtcggcgttaccgctacagccctcagaccgtcaggcaccgtcattattgatgatgaacgtctggatgtcgtctcggaaggatcattcactgaaaaagacagacaggtgaaagtagtgaaagcggaaggctcacgcattgtcgtgagagaaatatagatgataaccttgaggaggaattagatggaactgtcaagtttggcgattttagcattagttgctgctgccattattgtgttagccatattctttacctttgtaccggtgatgctatggatttcggcgcttgcggcaggagtcagaatcagcattttcactttggtcgggatgaggctgcggcgcgtcataccaagccgcgttgtcaatccgttaattaaagcgcacaaagccggcctgtccgcaacaacaaatcagctcgaaagccattatctggccggaggtaatgtcgacagggtggtcaatgccctgattgcggcacagcgcgccaatattgaactgtcatttgaacgctgcgcagccattgacctggccgggcgtgacgtattggaagccgtacagatgagcgttaatccgaaggtcattgaaacaccgtttatcgcgggtgtcgccatggacggaattgaagtaaaagcaaaagccagaatcacagtaagagccaatattgagcgccttgtcggaggagcgggagaagagacggttgtcgcccgtgtcggagaagggattgtctcgacaatcggttcttcacacaatcataaaaaagtgcttgaaaaccctgatatgatttcacagaccgtacttggcaaagggctggattcaggcaccgcatttgaaattctttcgattgacatcgccgacgttgatatcggcaaaaacattggagcgattcttcagacggatcaggcagaagcagacaaaaacattgcgcaggccaaagccgaagagcgccgcgccatggcggtcgcccaagagcaggaaatgcgcgctcgcgtagaagaaatgcgtgcaaaagtcgtggaagcagaagccgaagtgccgcttgcgatggcagaagcgttgcgtgaaggaaacatcggcgtcatggactatatgaacataaaaaatatcgacgcggatacggacatgagggattctatcggcaagctgacgaatgaccagcaagatgaagaccaacaataacctctctattaaggagggagccgctatatgcacgagattctgacaaatccgctcgtcattgccgccgtcatcggcattatatcggcaatattcggcaagaaaaacaaagatgaaaaacgtccgccgggtacacgtcccggaaatcaggcaaaaaagcaggatcaaaaacagccgcagaaagagcataagccggaagcggaagaattgcctgccgtttcagaagagaacccttttgagcaaaaaagaagggaagctgaaaagcgcctagcgaagacggagcagatgtttaacgggctcgaacataagctgacatccgcacgcgcacgaaacgcgtctctgaagaaatcagccctcaaaataaataaagaaactgcggtccaaggcattatattcagtgaggttttgggtccgccccgtgcaaaaaaaccgcaccggaccatgcggaacatcggtaaaaaataaagtgttagaaccccttttcaaatcatacatatgagatgaaagggggttctttttttatggggcaaagaaagaatcgtgtaaaggcatggctgacaagagcattggaaattcccccggacgttatgatggatctgcctcgtattacgatggtcggcagacttcatatctacatagagaatcacagaggcctcctgctgttcagtgaagaagaagtcaggctgatgctcaagcagggtcagtgtatcatatcaggaaaaaacttggtcattaaggcaatccttcctgaggaaatccttttggaaggcacgatagatcacgtacgatatgtcgattcataaagccggggggaaataatgtgaaaaacaaatggctgtcatttttttcgggtaaagtccaaatggaagtcaaaggaaaagggattgaacggctgctgaatgaatgcacgagaaacggaatcgccatctttgcggtgaaaaaaaagcaagactgtgttctgctgatgattcagcttcaagatgtacatgctttcagaagagtcatcagaaaacatgaatgcaaagcaagctttacaaaaagaaagggtcttccctttctgcttctcaaatcaagattaaacctgggcttcactgcagggtttttgatattttttgttatattgtttcttttgtccaacatgatttgggaaattgatattaaaggggccaagccagaaaccgagcatcagatggtaaagcaccttgaagaaatcggtgtgaaaaaaggccgtttgcaatttttaatgatgacgccggaaaaaattcaaaaatcattaacaaacggcatcgataatattacgtgggtcggtgtggaattgaacgggacagcccttcatatgaaagtggtcgaaaagaacgaaccgacaaaagaaaagtacgtgagcccccgtcatatcgttgccaaaaagaaggcggtcatcaaaaggatgttcgtgcaaaaggggcagccgatggcttttgtgaacgatcatgttgacaaaggacagctcctcgtctcaggactgatcggaaatgaagaccggaaagtcgcctcaaaagcggaaatttacggagaaacatggtacaagtcagaagtaaccgtgccccttgaaacatcatttacgctatatacgggtaaagtaaggacgaagcacaagctgtctttcggatcatggggcgtgcctttttggggctttgaatttaatgagaagccgctgaaacatccgaaaacagaggaagaaaagcatccgtttcaatttctggggatgaagcttccggtttcttacgtttcagaacagacaagagaaagtgaaacatccgtgcggacttatacgaaaggcgaagcggttcaggccggtatcaaaatgggaagacaagatgtagaaaagcgattaaacggcagcggagaggtggaaagtgaaaaagttttgcaccaatccgttgagaatggtaaagtaaagttgattattctctaccaagttatagaagatatcgttcaaaccacacctattgttcagggagactaaagaatggcagaacatttacttgcgattaatcacaaactgaaaagcccggacgaagcactttctttgttcggcagccaagatgcttttttacatttaatggagaaggatctgggcattagcctcatcacacgcggtgaaaccatttacgtttccgggaatgatgaaacatttgagatcgctgacagattattgggctcgctccttactttaattcgcaaggggatcgagatttcggaacgtgatgtgctgtatgccgtaaaaatggcaaaaaaagatgaactggactattttgaaagcatgtatgaagaggaaataacgaaaacggcaaaaggcaaaccgatccgtgtcaaaaccatcggccaaagagaatatgtggcggcgatgaagaaaaacgacatggtgttcggcatcgggccggcgggaaccggcaaaacttatttggcggtcgtaaaagcggtgcatgctttaaaaaacggccacattaaaaaaatcattttaacaagacccgctgtggaagccggcgagagcctcggttttctgcccggagatttaaaggaaaaagtagatccttatctgcgcccgctgtatgacgcgctccatgatgtgctcggaagcgaccatacggagcgtcttatggaaagaggggttatcgaaatcgccccgcttgcctatatgagagggcggacgcttgacgacgcgtatgtgattcttgatgaagcccagaataccactcccgctcaaatgaaaatgtttttgacgagattgggttttggctctaaaatgatcattacgggcgacgtaagccaaattgacctgccgaaaggcgtcacatcgggacttgcagtggcgaaggatatgctgaaggacgtaaacggcatctccgtgattgaacttgaccagacagatgtggtcaggcatccgcttgttgcaaaaattattgaagcttatgataagcaaaagtaatgcaaaaatgacccgatctcccgttatcgggtcatttttatatgatgtgttcctgatgtttcagggaggaggttcttgttttgaaaaagaagggaaagggcaaaagcgcccgggaacggttccgcagtttcagacatgcccgctcagcccatgtgctgctgtacctgctgctttcagcgatcatgtttggtttgctctttattcatgtaaaacctgaatcacttaatttggatttgtttgcagtcagtgataagacgatttacgcgcccgccacagtggaagatcagcaggcgacggaatcgaaaaaacaggcggccgaagatgcggtggaagatcaatacactctgaaaaaaggctataccgacaatcggcttgacctgatcacttccatttttgacagcatcggcgaagtgaaaaaagatgcggaaaaagacaaaaagtcaccttcggaaaaatcactggtaaaatcggtgaaaaacaagctgacacaggatgtcaatgaatccgtctcggaagatgccattaaatcgcttctccatgcaaacaatgaagatttctcatttgtgagggattccgtcattaccgcggtgaatacggtgatgagcagtgaaattccttctgaaaagcttgctgaagcgaaggataaggtcgcaaaagagctgaaaagtgcttctgtgccgtcaaaatatttagcggctgcgactgaaatcggaaaatacgcggtcatcccgaattacgtttttgatccgaaagcgaccgatgaaaaacgccaggaagcgtcagacagcgtccagccggtacagatcaaacagggacaggttctcgtggaagagaatgatctgattgaccgggaagtatacaggaagcttgaactgacgggtcttttgaataattccaacctgttaaaaccgatcagcggtcttcttctgatgatcggcctgtttattgccacgcttgtctactattttgagaaacagcagcaggagcttaagctgaaaaataaatctcttttgctgttttctatcattacaacgcttattctcgtcattatggaagtcgtcagtctctttcagaagattgaatacaccaatatcggctatcttgtgccgatcgccgccggcgcgattttaatcaggctgctgctcaatgaaaggctcgccattttaggaagcatcattctggcgatctgcggcagtatgatgtttaatcagggtgtgacgggaacatttaattacgtcatcggcatttactatttaatcagcagcatttcaggcattctgtttttgggaaaacataatgcgaggtcaaaaatattgcagacgggactgttcgtctcatttattaatatgattatcgtgctgtcgcttttattaatacaaaatacggcgctgtcaccggttgaaatcggaacgctgatgctgatgggggtcgtctcgggacttgcttcatccgttttgattatcggtctgatgccgttttttgagacgggattcggcattctttcaacaatgaggctgattgaactgtctaatccgaatcatcccctgcttcgaaagattttaacggaaacacccggtacatatcatcacagcgtcatggtggcaaatctgtcggaagcggcttgtgaagccgtaggggcaaacggtcttttagcacgggtcggagcgtattatcacgatctcggcaaaacgaaacgtccgcaatattttattgaaaatcagatgaatatggataatccgcatgacaagctgtctcctcagctcagcaaaaatatcattatcgcacatacgacagacggtgcgaatatgctcagaagctataagtttccgaaagagcttgtggatatcgcggagcagcatcacggaacgtcccttttaaaattcttttattataaagcgaaagaaaagggcgaccagattacagagaaagagttccgctacccggggccgaagccgcaatcgaaagaagcggctattatctcagtggccgacagcgttgaagccgccgtccgttccatgcataatcccaatcccgagcggatcgaaaaactggtgcggggaattatatccgataagcttcaggacggacaattctcagaatgtgatctcacgttccgagaactggatacgatcgcaaaaacactatgtgcgactttaaaaggaattttccactcccggattgaatatccggaggctacgaagaaggtgaaataaatgagtttactcatagatattgttgatgaaacgaacagcgtctcagctgatgcgctccaagaagtggagaagctgctccaattcgcggcggaaaaagaaggcgttcaggaccaggctgaagtatcggtcacgattgtgacaaatgaggaaatcagagaaatcaacagagactaccggggaaaagacactccgactgacgtcatttcgtttgcgcttgaagaagaaggcgaagacgaggttgaaatcgtaggcgccgacatgccgcctgttttaggagatattatcatcagcgcagacagaacgaaagagcaggcggaagagtacggccattcgtttatgagagagctcggttttctggccgtgcacggctttttgcatttgcttggctatgatcacatgacaaaagaagaagaggaagaaatgttttcaaagcaaaaggatttgctggatgagtatggactcacgagatcataaaaacgagtggagcaggttcctgaagagctttgtccatgcatggaggggaatctggaaaacggcgcggtcagagcggaattttcaatttcatattaccgcggcctgcgccgttatcgtttgcggttttctcaccgggctgagcacagccgaatgggccattgttttggtgctgatcggagggatgcttgctttggagcttttaaatacggcgatagagcatgttgtggatttagttaccgatcagtatcacccgctcgcaaaagcggcaaaggacgcggccgccggagccgtttgcgtctttgccgtgatatcgtgtatcattggtttactcatcttcttgccgaagatatgttagcagaagattcttacaattattttacattgccaaaaatgggcgtgaaaaaccaatcgtaattatgtaaaataaaagtgacagcggtatcatacaggataaaggtaagagaggaattaagtacacatgaacagacaagaattgattgcagaagcattaaaagcgcgggacacagcgtatgtgccgtattcaaatttcagagtgggagccgctcttcttaccaaagacggaaaagtgtacagaggctgcaacatcgaaaatgcggcatacagcatgtgcaactgtgctgaacgcacggcgatattcaaagctgtttccgagggggatacggaatttgcgatgctcgccgtggctgcggatactccgggaccggtttcgccgtgcggagcctgcagacaagtaatttccgagctgtgctcaaaggatatgcttgttattctgaccaacttacaaggacaaataaaagaaatgactgcggaagaattattaccgggcgcattttcatcggaggatttacatgacgaacgaaagctttaaatcaggatttgtatctatcatcggaaggccgaatgtaggaaagtctacctttttaaacagggtcatcggtcaaaagatcgccatcatgagcgacaaaccccagacgacaagaaataaagtccaaggggtgctgacaaccggcacgtcgcagaccatttttattgatacaccgggcattcacaaaccaaagcacaagcttggcgactttatgatgaaagtggcgcagaatacgctgaaagaagttgacttggtgttatttatgattaacgccgaagaagggtacggaaaaggcgacgagtttatcattgaaaagctcggacagacgtctacaccggtctttctgatcgttaacaaaattgataagatccaccctgaccagctgcttcttttaattgatgagtaccgtacgcgctatccgtttaaagaaatcgtgccgatctcagctttggaagggaacaacgtcgaaacccttctcgcgcagattgaagcgtatttaccggaagggcctcagttctatccgagcgatcaggtgactgaccaccccgagcggttcattatttctgaactgatcagagaaaaggtgctccatctgacaagggaagaagtgccgcacagcatcgctgtcgccatcgagtccattaaagggcaggaaaacggctccgtccatgtcgccgccaccattgtggtcgagcgggattctcaaaaaggcatcgtcatcggtaaaaaaggagcgcttctgaaagaagtcggcaaaagagcgcgggctgatattgaagctcttttgggctcacgcgtttacctggaattatgggtgaaggtgcagaaggactggcggaataaaatgtctcagctgcgtgatttcggcttcaaagaggatgaatattaattcatctaaggcgcatgtctgaggtgtgagattacctcacagaagcagggattcgttagcaaaatttgtttaacatgaaaaggaggacatcaggtcaagataagggtaagaatttggatttgcaagctagtttaatgacgaaaggtgggttttttgtgttgaattttacctggaacgtattttctcaaacaggaagtgttgatacgtaccttctttttaaagaactggaaaaagagaacctggaaagacccgaagaaccggaagatgagctagcccgaattgattttccaattttgtaaacctcttggcccctcccattgttggaaggtgcggaaatgctgactaaatgtgaaggaatcgtgctccgtacgaatgactacggggagacgaataaaatcgtgacattgctgacgagggaacacggcaaaatcggcgtcatggcaaggggcgccaggaagtcagccagccggctgtcagcagtcagccagccgtttttgtacgggtcatttttaatgcaaagaacatccggactcggcacgctccagcagggtgaaatgattctcagcatgagaacgatcagagaagatttatttttgacggcgtatgccgcttttatcgctgaactcactgacaaaggaacggaagagaagaaaccgaacccctatttattcgaattgattctcgaatcctttaagaggctgaatgacgggactgacccggacgtgatcaccttcatcgtgcagatgaaaatgctcggcgtcatggggctgtatccggagctgaatcattgtgtccactgcaaaagcggggaagggacgtttcatttttcgataagagataacgggtttatctgccaccgctgctttgaaaaggatccgtacagagttccgatgtcgccgcaaacggcaaggctgctaaggcttttttattactttgatatcggaaggctcggcagcgtctcgttaaaacaggaaaccaaaaacgaaattaaacgggtcattgatctgtattacgaggaatattcaggactttatttaaagtcaaaacggtttttagatcagatggaaagcatgaagaaccttttggatgaaaacaaaagttgacattctgcccatctttttatatgatcatttattataaaatatgttgcagtgacagaaagaagtacttgcgtccaactcatacaagcgaccttagggcagtgtaagctaaggatgagcgcgcaacgaaaggcattctcgagcaaccctttaaaaagaggctgagtgattcacatcctcagcaactagggtggaaccgcgggagaactctcgtccctatgtttgcggccggcaagcatagagacgggagttttttggttgccgccgcacttgtaaaagaatggagaaagtggaggtgcttgaaatgaacattcaagatatgattttaaccttgcagaagcactggtcgaatgaaggctgtgtgctcatgcagtcgtatgatgtggagaaaggcgcaggcacaatgagcccgtatacatttttacgaagcatcgggccggaaccgtggagagtggcttacgttgagccgtccagacggcctgcggacggacggtacggtgaaaacccgaacaggctctatcagcatcatcaattccaagtcattatcaagccgtcgcctgataacattcaagagctttaccttgattcattgcgtgcgctcggcattgacccgcttgaacatgatatccgtttcgtagaagacaactgggaaaacccgtctttaggctgtgcaggtctcggctgggaagtatggcttgacgggatggaaattactcagtttacatacttccagcaggtgggcggaattgaatgtaaaccggtatccgttgagatcacatatggtattgaacgtctcgcgtcatatattcaggataaagaaaacgtctttgatcttgaatggacgtcaggatttactgtgaaagatttatttatgatggctgaatatgagcattccgtttatacttttgaaacatctgacgtggatatgcttttccatttgttcagcacctatgaaaaagaagcgatcagacaaatggataacgggctcgtgcatccggcctatgattatgtgctgaaatgctctcacacatttaatctgctcgatgcaaaaggcgcgatctcggtgacggagcggacgggttatatcggccgtgtccgcaacttagcgagaaaagtggcaaaaacgtattatgaagaacgggaaaaattagggttcccaatgcttaaagaggagggctcttcccatgagtaaacaagacttgcttttagagatcggactcgaggaaatgccggcgcggtttttacatgacagcatggtgcagctcggtgaaaagctgaccggctggctggctgaaaaaaatatcgcccatggcgaagtgaaactttttaatacgccgagacgtctggcagtatatataaaagacgtagcagaaaaacaggctgatattcaggaagaagcaaaaggccctgcgaaaaaaatcgctctggatgctgacggaaactggacaaaagccgctatcggattttcaaaaggccaaggcgccggagtggatgacctgtatataaaagatgtaaacggcacggaatatgtcttcgttcaaaaattccaggcgggacaagagacgaagacacttttaccgcagctggaaaatttgattgccggaatgcatttcccgaaaaacatgcgctggggcacgcaggatctgcgctatatccgtccgatcaaatggattatcgctctctttggaaaagacgtcattccgtttaaaatcacaaatgtcgagacgggccggaacacacagggacaccgctttctcggccaagaagtatctgttgatgcaccgtcatcatacgaaaagctgctgaaagaacaaagcgtcattgctgacccgaaagaacgcaaacaaatgatccaaagccagctggacgcgcttgcagccgagaagaaatggaacattccgatagatgaggatctgctgaacgaagtcaaccatctggtggaatacccgacggcgctttacggatcttttgaatccgagtttctttctatccctgaagaagtgcttgtaacaacaatgaaagagcatcagcgctacttcccggtaaaagatgaaaacgggaatctgcttcctcattttattacggtaagaaacgggaacagccatgcaattgaaaatgttgcccgcggaaacgagaaagtgctgagagcaaggctttcagatgctgcgttcttctacaaagaagaccaaaagctgaacattgatgaaaatgtgaagaaactggaaaatatcgttttccatgaagagctcggctcccttggagataaagtaagaagagtgaccgccattgcgggcaaacttgccgtccgcctgaaagcggatgaacagacgcaaaaacttgtgaagcgcgccgcagagatttctaaatttgacctggttacacatatgatctatgagttcccagagcttcaaggcgtgatgggagaaaaatatgcgcgcatgctcggtgaagatgatgccgtcgctgccgctgtcaatgagcactatatgccgagagcggccgggggagaagtgccttcaacctttaccggcgcggtcgtggcgttagctgataaactagacacgattgcttccttcttcagcattgacgtaattccgacaggttctcaggacccgtacggattgcgccgtcaggcaagcggcatcgtttccattctgatcgaccgcaattggggcatttcttttaaagagctgctgtcattgacagaaacggaaaaagaaaatgagctcctcgatttctttacacagcgtctgaaatacgtcttaaacgctgaagacatccgtcatgacgttattgaagccgttctggacagcacagagcttgagccgtatgcagccgttcataaggcaagagtgcttgagaagcacctcggcacacccggctttaaagaaacggctgaatcactcggccgggtcatctccatcagcaaaaaaggcgagagccgcgatatcaatccggatctgtttgaaaatgaacaggagaaaaagctgtttgacgcttatcaaaaaacaaaagacagtgtcgcggaaagctttgcctccaaaaactatgaacaggcgcttgccgtgctcagcggattaaaggagccgattgaagactactttaatcacacgatggtaaatgcggacgatgaagcattaaaaaccaaccgtttagcgcaaatgaccgctcttgcagatgtgatcaagtcttttgctaatatgaatcatcttattgtaaaataaagaaaaagacggttgctgtgtgatcggcaatcgtcttttccccttttacataaacatcacagaatgaaaacatagataaagaaacccttccattaaggtggtgagtacgatcgaattaaataaacggcaagaacaaattttacagattgtaaaggaaaacggcccgattaccggagagcatatcgcagaacagctcaatttaacgagggccacgctgcggccggacttggccatactcaccatgtcaggcttcttagaggcccgtccgcgggtcggttatttttatacggggaaaacgggaaatcagctgcttgcggataaattgaaaaagctgcaagtgaaagattttcaatcgatccctgttgtcatcaatgaaaatgtctcggtatacgatgccatctgcaccatgtttttagaagatgtcggcacgttatttgtcgtagatcgtgatgctgtcttagtcggtgtgctgtcacgcaaagatttgctgcgggcgagcatcggccagcaggaacttgcctcaataccggttcatattatcatgacaagaatgccgaatatcgccgtctgccggcgtgacgattatgtgatggacatcgccaagtatttaattgaaaaacagatcgatgccctgcccgttattaaagatacggataaaggctttgaggtcatcggccggtttaccaaaacgaatatgactaagatacttgtcagtttatcagaaaatgaaatcatataagcttgaaaactaacggggggataacatggacaatcgcatcatttatgtagtatcagactcagtcggagaaaccgccgaactcgttgtaaaagcctcgctcagccagtttaacggctcagccgatgatacgcatatcagaagaataccttatgtggaagatatcggcaccattaatgaagtcgtgtctctcgccaaagcggacggcggcattatttgttttacgctcgttgttcctgaaatgcgcaaatacctggttgaacaagcggaaaaagcgaatgtgctgtattacgatattatcggtccgctcatcgataaaatggaatcggcttacggtctgaccgccaaatatgaaccgggccgcgtccgccagcttgatgaagattatttcaaaaaggtcgaggcgatcgagtttgccgtcaaatatgacgatggcagggatccaagaggcattttaaaagccgatatcatcctgctcggagtatccagaacgtctaaaaccccattatcacaatatcttgcccataagcgtctgaaagtggccaatgtgccgatcgttcctgaggtcgatccgccggaagaactgttcagcgttgatccgaaaaaatgcatcggcttaaaaatcagccctgataaactgaaccatatacgaaaagaacggttaaaatctctcggcttaaatgacaaagccatttacgccaatatcaacagaattaaagaagagctggagtattttgagaaaatcgtggaccggatcggctgccaagtcgttgacgtttcgaataaagcggtcgaggaaacagcgaacatcattcatcatctcaaaacaaagggccgataactcaggacgctttatcctgggtttttgggtatgcaaatagggaataaacaaaaaggatggcatcttcgcgaagtttgtattataataaaaaattgtgataaaatgtttatttttaggtttaagcttcgtgtgatacgaataaactattatgggtaagatgtcaagaataactcccggaaatttttcgacaaagctcaaaatagatccgcagtcatggagcatatgcgatttcgcttgtttttatgcaggagattgatggagggatggagaattagtcttctaaatgaaaaagaaaagacgatttttgtcgatgcagacgcatgccccgtaaaagaggaaataatgctcattgcatcgcaattcagcgttcgggttattttcgtcgcatcatttgaacactaccagctttccagaagcaaagacgagaactgggtatacgttgatcctcataaagaagcggcagacttatatatcgcaaaccatgtgagatcgggagacgtcgtagtcacgcaggatatcggtttagcctctcttttgctgaacagaaatattgccgtcttatcggaaaggggccgttcttatactgaagacacgattgacttcgctctgatgagccgtcatatgtcaggcaaaatgagaagaagcggcattcattccaaaggacctaaaaaattaaataaagaagatcggaatcgatttgttaccctgcttaaaaaaatcctgtcgaatgatgaagggatttcaaatcaaaacatcgaataatgtacgacggagtgttataagatgggaaaccgcataccagatgaagtagttaatcaggtgcagcagtcagcagacattgttgaagtcataggtgattatgtccaattgaaaaagcaaggccgcaactactttgggctctgtccgtttcacggggaaaacacgccctcgttttccgtctccagcgataagcagatctttcattgcttcggatgcggtgcgggcgggaacgttttctctttcttacggcagatggaaggttattcatttacggaagctgtttctcaccttgcggataaatatcagattgatttccctgatgatataacgattcactctgcatccaggccggaatcttccggagagcagaagatggcggaagcccacgagcttctgaagaaattttaccatcatttgctaataaatacaaaggaaggccaggaagcgttagattaccttttatcaaggggttttacgaaagagctcatagatgagtttgaaatcggctacgcgctggattcctgggatttcatgacgaaattcttgaaaaagcgcggttttgaggaagaactgatggaaaaagcgggtctgctgatcagaagggaagacggcagcgggtattttgaccgtttcagaaacagaattatgtttcccattcatgatcaccacggagccgtggcggctttttcaggaagggcgctcggaagccagcagccgaaatatatgaacagcccggaaacgccgctgtttcataaatctaagctgctgtataactttcataaggcgcgcctgccgatcaggaaagaggagagagccgttctgtttgaaggcttcgctgacgtcatatccgccgtcagctcaggcgtaaaagaaagtatcgccacaatggggacgtcgctcaccgaagaacatgtgaaaatcctcagaagaaatgttcaggaggtcattctctgctacgattcggataaagccgggtacgaagctacgctgaaagcggccggcctgctccagaaagccgattgtaaggtaagagtaagcatgctgcctgacggacttgatcctgatgattatatcagaacccggggcggagaaaaattccggaccgatatcattgatgcaagcgttacggtcatggcttttaaaatgcagtatttccgcaaagggaaaaacttatctgacgaaggagaccggctcgcttacatgaaagaagtgctgaaagaaatcagcgctctttccgggtcgcttgagcaggaaatgtatgtgaagcagctcgcctcagaattttctctttcggtagaatctttgacggaacagctttccatctacgccagacaaaacgcccccggcgacaaaaacgccgaaccgcagacaaggcgggcccgggtgacgacaaaagcgaaacggcgccgtctccgtcccgcctatgagaacgcggaaagacttctgctcgctcatatgctgagagaccgaaacgtcataaagaaagtgattgagcgtgtcggctttgaatttaacattgacggacatcgtgcgctggcagcatacctgtacgctgtttatgaagagggcgctgacatgacgccgcagcatcttatggcgagaatgcaggatgaggaaatcagccagctgctttcagatatagggatgctccaagtaaacgaggagctctcagaggccgagttatccgattacgtaaaaaaagtgttggatcaccgaaaatggtcaatgataaaggaaaaagaagcagaaagagcggatgcggagaggcagaaagacttcgtgaaagctgcgtctctggctcaagaaattgttgcattgaaccgatcattaaagtaacaccaaaaagaggcttgcgttctgattggcaatgattccttgcggaggagcaaatagatcgcttaacctcatcatgaattgtcatttattatccgcagccctgcatgctgaaaaagagagaaggcttccgggtcggataagaaacataccgcttttagaattcgttgcaagctttggaaggagggatccataatggctgataaacaaacccacgaaacagaaacagaacttacattagaccaggtaaaagagcagcttactgaaactggaaaaaaacgtggcgttttaacatatgaagaaattgctgaacgcatgtccagctttgaaattgaatcagaccaaatggatgagtattatgaatttttaggagaacaaggtgttgaattaattagtgaaaatgaagaaacggaagatcctaatattcaacagcttgccaaagccgaagaagaatttgaccttaatgacctcagcgtaccgcctggcgtaaagatcaatgatccagtccgcatgtaccttaaggaaatcggacgggtaaatcttctttctgctaaagaagaaatcacctacgctcaaaaaattgaagagggtgacgaggaatctaaacgcagactggctgaagcaaaccttcgtttagttgtcagcattgctaaacggtatgtcggccgcggcatgcttttcttagacttgatccaagaaggaaacatgggtctcatgaaagccgtcgagaagtttgactaccgtaaaggatataaattcagtacgtatgcgacttggtggatcagacaggcgattacacgcgccatcgctgaccaggcgagaacaatccgtatcccggttcacatggtggaaaccatcaacaaattaatccgggtgcagcgtcagcttcttcaggatcttggcagagagccgacaccggaagagattgctgaagacatggatcttacgcctgaaaaagtccgtgaaatattaaaaattgctcaagagcctgtttctttagaaacgccgatcggtgaagaggacgactcacatctcggtgatttcatcgaagaccaggaagcgacatctccgtcggatcatgcggcatatgagcttttaaaagaacagctggaagatgtgctggatacgttgacagatcgtgaagaaaacgtgctgcgtctccgtttcggtctggatgacggacgcacaagaactttggaagaagtaggcaaagtgtttggagtaacgagagagcgtattcgccaaattgaagcaaaagcgcttcgcaaattgagacatccgagcagaagcaaacgtctgaaggattttctcgaatagaatggaacgggtctttttgatccgttcttttttatgtataagatatatggataatatacctttattttactggataagcatatgttttgcaaatgagtttggaaaaaatgcggcatgtcctgaaagggggaaaatgagataagtttatttatattctttattgtaagcgtatacaattcattatacaatagaataaagataattttgtgataaacaaaacagttatttttgctttttgtataaattgtgaaatcaatgaaattgctgagcaagaccatttactttttgtaaaaataagttagaattagaagtgtttacatagggggagaatgaaaaagggggatggagatatgaagtggaatccgctgattccttttttgctcattgcagtgctgggaatagggctgactttctttttagctgtaaaaggcaatggagatgcgcatcagatcgcaagcggcggtgaaagcaaaaatgccgagaaggaaactgcaaacgcttcacctgaagagatttataaagcgaactgcatcacctgtcacggggaaaactatgaaggtgtgtcagggccgaacttaaaaggcgtcggcaaaagaaaagatgtcgctgagattaaaacaaaaattgaaaaaggcggcaacgggatgcccgcaggccttgtgccggccgaaaagctggatgacatggcaaaatgggtttctgacattaaataaagctttaccggtccctatataaaagacatatgaaaaactctatccgccgcttggattccgggcggtttttttatatgatagtaaaggaaaaagaacctgagaaaagttgtgatattgtgaatgaaatgaagttatctaaaagattgcagtctgtggcggaatatatccctccgggtgccctggttgctgatatcgggtcggaccacgcgtatcttccttgctatgccgttttgaatcatttggcaagccgggcaatcgccggtgaaattacagacggaccgtttctatccgccaaacagcaggtggaaaaactggacttaagcactcttatctccgtaaggaaaggtgacgggctgagcgtccttgaaaaaggagaagccggcgccattacaatcgctggcatgggcggagcgctgatcgctcatattttggagtccggaaaaacgaaattgacggggcgtgaacggctgattctgcagccgaatattcatgccgttcatataagagagtggctgtatcaggaaggctatgaactgattgatgaagtgattctcgaagaagacggaaagtgttatgaaatcctcgttgcggaaactggcgaccgtgatgcgccgtatcgggacgtgccgatggctgccggaatgcttgcgggtccgtttttattaaaagagaggaatgaagtgtttcttcggaaatggagccaggaacttaagcatactgaacaaatttatgaacagatcagccgcagcgcaaagcatgaaagtcatgaaaaattagctgaattgaaagagcggatttctctgctgaaggaggtaatcggacatgcctaaacatgtgaacggacaggaaatcatccagctgtttgaacaattttcaccgaaggcttttgcggtggaaggagataaaatcggcctgcagatcggtacattgaataagccggtgaaaaatgtcatggtgacactggatgttctggaacaaacggtagatgaagccattgagaaaaaagttgacttaattatcgcccaccatccgccgatttttcggccgcttaaacagatcaccactgatcagcctggcggaagactgattgagaaatgtataaagcatgatattgccgtatatgcggctcatacgaatcttgatgtggcggacggcggtgtgaatgatctgcttgccgaagctctcggcctgacagacacagaagtgcttgtcccgacatattcggacccgctgaaaaagcttgccgtatatgttccgaaagactatgaagaagctgtaagaaccgcacttggcaacgccggagcgggacatatcggcaattacagccattgcgcgttctcctctgagggaatcggcagctttaagccgctggacggggcagaaccgtttatcggacagacgggagagctggaactcgtccatgaagtgagacttgagaccgtttttccggcaagtatggagaaaaccgtcgtaaaagcgctgaaaaaaagccatccgtatgaagaggtggcatatgatatttatccagtggagcagtctccgcttgaaaaagggctcggccgcatcggaaaacttcagcaagacatgacgcttgaagagtttgctctgtttgtgaaagaaaagtttgacgttaacggagtccggatggtcggagagcgaaacagcaaggtgaaaaaagtcgcggttcttggcggtgacggaaataaatatatttatcaggcaaagcggaagggtgcagatgtttacgtgacgggcgatctttatttccatgtagcgcatgatgcgatgatgatggggttaaacgtcgtggacccggggcattatgctgaaaagatcatgagaaaaggcacggctgagaagcttacggcaatggccggggagaaaaactatgatgtgcgcattttcgcttccgaaacagatacaaacccatttactttcttataaaaaaactgaggcccccggcctcagttttttatttttactttcggaaggattttttttagcggcacactgtgttcaagctgccatgtcgattcatcgttgtggtcaaactgctctaaaaagcggatgacttcctttgtaatcggtgtcggtgttgatgcgcctgcggtaacggcgacggtattgacgtctttcagccattcgagcttcagttcactgatgtctccgattcggtaggcttttgttccggcgatttcttctgacacttgagccagtctgttggagttattgcttttcggatcaccgacaacaatggttaagtccgctttttttgcctgctctgatacagcttcttgacgaacctgtgtggccaggcagatttcctgatggtattccacgtacgggtacttttctttgactgattccataatatcgtggacgtcccactgggacattgtcgtttggtttgtaacgattaatttctcagcctgaatatcgagatttctcacgtcttcctctgtttcaacgagatgaacgatttcaggagcgacgccgacggctccttcaggctcggggtggccttttttaccgatgtatatgacgtgataaccttcagcttttacttttcggattaagtcatgtgttttcgtgacgtccgggcatgtggcgtcaatcgtaacaagccctttttcctcagcggcttttcttacttccggagataccccgtgagccgtgaaaataacggttcctttttccacctgctttaaaatctccagacggtttgtgccgtcaagcgtgtaaatgccgtcttcctcaaacgcatctgtgacatgcttattatgaacaatcattcccagtatatatataggtcttggcagtgttttatcgagtgacgcgtttttggctatgaccatggcatcaacaacgccgtaacagtagccgcgcggcgatattttgataacgtccaatgtagatgtcctcctatcaaaagtgagtgtagaggcaatataaaaagccgtagttaaacggctcaaatcttgcattcttctgatctcattatagctaatctttcgtgagatatcaaagaatgttaaatatataatttcggctttgatctgcccgatgttctttttggacgcggctgttccgctgagtctgcctgtgcggcgtctttttcttttgaagcggatgctttttcagacgtcttctttgatgttttggatgaggcgtctgatttgttttcatcttctgtttcatctgtttcatctgttttttcagcttcatcctttttgttctgttcgtctgtttctttcgtctcgtcagattcattctcgtcatcactgctgcttaattggctgtaaagcttcatcatggcgggcagactccgtactaaaggaccgtactgctgaatcatcggcgtaacctgctgcgccacgccgagcaccttctgaacgttgccgagcatgctcgacagggatgccggacttgccaggttctgtattccctgcagtcctgcacctgctcctccgctggccgccgccggtgccgacgcggcagcgcttcctcctcctgaaccgggtaaaaaacgggaaagcataccttttaagccccctccgccgcccgtgcctgcgtttctcaggcccgctccggcaatctgctgctgagggaaaagctgccgtccctgctgcatcagctgccgtcccggcaatgacggtcttcctcccatcatcatacgcggattcataaacggccggccctgctgcgccatatttctcatcggctgctgtggaaacatacttgtacctcctttctgtctctctgctattacaatatgcatcggagggggcatttgcttttctgtctcgaaaacaggattcccccaagacatggtgtttttaagtaaaatcggttataatgtgatgatggacacagaatgtgccgctttaaggagctgggaaaaatgaaagaaactaaatttgatggatacaacttaaaaccgtttattatagatgcagttcaccgccttggtttttatgaaccgacagatattcaaaagcgtctgatacctgccgtactgaaaaacgaaagcgtgatcgggcagtcccagacggggacggggaaaacccacgcctatttattgccaattttgaatcggattgatccgggttctgatacggtacaggctgttatcacggcgccgacgagagagcttgccaatcagattcatcaggaagcgctcaaaatcacacagggtgcggaagatgagccgatccggacaaaatgcttcatcggcgggacggacaagcaaaaatcaattgataagctgaaaacacagcctcatctcgtcgtcggaacgccgggccggatcgcggatctgattaaggcgcaggcattgaacgtctataaagcgcagtctctcgtcattgacgaagctgatctgatgcttgacatgggctttttagaagacgttgattacatcggatcgcgtatgccggaagaactgcagatgcttgtgttctcagctacgattccagaaaagctgaagccgtttttgaaaaagtatatggaaaatccgaagtacgcgcatgttgagccgaaaagaatcacagccgaaaagattgaacatgttttggttccttctaaacagcgtgataaagacaaactgctttttgatatgatgtctcatctgaatccttatctgggcattgtgtttgcaaatacgaaaaacacggctgaccatattgcgaaatacctgactgaaaaaggaatgagggtcggtcttctgcacgggggattaacgccgcgtgagcgcaaaaaggtaatgaagcagattaatgatctggagttcacttatgtcattgcgacagaccttgcggctagaggaattgacattaaaggcgtaagccacgtcatcaactacgagcttccggacgatttggatttttatgttcaccgtgtcggaagaactgcacgcgccggttcatcaggccaagcactgaccatttatgagctttctgacgaagatgcgctcgcaagacttgaaaagatgggcattgtgtttgactatgcggagcttgtaaacggggaatggaagaaaggcgatgaccgccaccgccgtaaaaatcgcaaaaagacggcaaatgaggctgaccaaattgcgaaacgcctcgtaaaaaagccgaaaaaagtaaagccgggctataaaaagaaaatgagctacgaaatggaaaaaattaaaaagaagcagagaagaaaccaatctaacagaggaaagtagggggaatcgggttgctgaaaataggttcacacgtctcaatgagcggaaaacatatgctccttgccgcaagcaaggaagctgtttcgtacggggcgaatacatttatgatctatacgggcgctccccaaaacacgcgccgcaaaaaaattgaagacttgaatattgaagcgggccgcgcccatatgaaggaaaacggtatcgacgagattgtcgtgcatgcgccgtacatcattaacatcggaaatacgacaaatccggcaacatttgagctgggcgttgattttctgcgttctgaaattgaaagaacggcagcgatcggcgcgagacagatcgtgcttcatccaggagcgcatgtcggagccggagctgaaacgggcatcaaaaaaatcattgaaggtttaaacgaagtgattgttcccgggcaaaacgtgcagattgcgctggagacaatggcgggcaaaggatcagaatgcgggagaagctttgaagagctggccgagatcattgcgggagtcacgcataatgaacatctatccgtctgctttgacacttgccacacccatgacgccgggtatgatgtcgctaatgattttgacggtgttcttaacgagtttgataaaatcgtcggcatcgatcggataaaagtccttcatgttaacgacagtaaaaatatcaaaggcgcccggaaagaccgccatgaaaatatcgggttcggagagatcggttttgacgctctgcagtacatcgttcatcacgagcagcttgccgatattccgaaaatcctcgaaacaccgtatgtaggtgaagacaagaaaaataagaagccgccgtaccgttttgaaatcgaaatgctgaaagaaaagcagtttgataaggagcttcttgaaaaaatatcagctcaataagaaagaaaggaggggcgggtgtccctccttttttaccctgagaattgattgaaaagttcgtcaactttccgcgccgtttcttttgaagttatcgtttccacttttttcagcaggcgcagccgctcctgttcatcaaaaatattgatgttttttccgtgcatcagagccgctacctcagccgcttgacttcttgtaatgctgatcccgtattgcttggaatatttcagcagatcgtccgcagtgacttgattgagccgctgcaaaataattctttgtattaaaatcatcgatactttcacctctttagacataatgtattgagcagatcattaaactgttacagcttttaatggtaaaataaagttgcttactgtttaaaatagttattataggaaaggagattttatgaccccaaataaacagcataaaagagaatcatttttacactttatcttcagggtcattatgattctgatcggggcgggttcagccgccgtaagtattgaattgtttctggtccctaataattttatcgacggaggcattatcggtgtttcattaattttagaccacctctttatgtccaatcccctcctcaattttgccttattcgttgtgttactcaacattccatttatgattttcggatataaatatatcggaaaaacatttctcatctctactgttatcggaatcgtcggtttagcgctgattgaatcctcattgcaccatgtggaggccattacgacccagcctattttggcgacggtattcggggggcttttgctcggtttcggggtaggccttgtcatccgaaacggaggctcgatggacggtactgaaatcctcggtatccttctcacgaaaaagctgcccttttcagtcggggaattcgttatgctcatcaatgtgtttattttcatttgggccggttttgtgttcggtccggagcaggcaatgtattctttcatgacttattatattgccatgaaaacgattgacgccgtcatccaggggcttgatgaaacaaaagcggtcattattgttgcagagcaatatgctgagatctcagatgcaatattgcaccggcttgggcggggaaccaccaaacttcaggggaaaggcggatatacggatgaaaccaaagaagtcatttacgcggtcgtgacaaggcttgaagtgactaaattgaaatccattgtgtttgaaattgataaaaacgcctttattacgatcatgaatacccatgaaacgaggggcggtaagttcaaaaccgcgattcactaggctttcatttacttttcatcattttataggtataatttgatacatcataagaaaatggcctgctgttcagacagctgccattttctttttggagcgataccgtgttgtaaaggggaggtcctcatgaacgtacaagaagcgttgaacctgctgaaagaaaaagggtataaatatacgagtaagcgagaagacatgctgcagctttttgctgattctgataaatatctgaccgccaaaaacgtgcttgccgcattaaatgacgactatccgggtctgagctttgataccatatacagaaatctttcgttatatgaagaactcggcattttggaaacgacggagctttccggagaaaaactgttccgttttacatgctcttatacccatcatcatcaccattttatctgtttaacctgcgggaaaacgaaggaaattgagtcctgtccgatggataagctgcacgatgatttggaagggtatgaaatcagcggccataagtttgaaatttacggcacctgtccggcgtgccgataaaaaacctcctgcttatacaggaggtttttttcagcttttgacatgctgaaagctatgtttgtttttattaatccaggcgacggcttcaagccaattctgcaccctgataatattggaatcgatggggagctgattatatggggagttaaaaaggataaccggaatgcctgcttcttttgcgatcattgtcgcattgccgtggtgatcttcgaaaaataaatcaatgccgtgttttttgacggcttccactttgtgatggcctccgacaagctcaatgtgatcgtaatgaatgtcccggtttgcaaaccagtccagcgtaacatcttctaagtggccgcgtcttgccgtaatgtagatcagacggtgctcttctttcagtccgtccagtgcctgcttggcaaattccgcgagcttcgcttctttatatatggctgcttcatgaacgttcatccattcccaaaattcctcgtctgtaatgttcaaaagcttcgtcagatcataatcagtcatatcatccaaggtaatggaaagatgaaatgagcggtttaaataagggacaaatgtatcctgtgccgtaactgtgccgtcaatatctatacctaaccgtaacatgtccacactcctataaattcatcccttcaagtgtaacataaacaattaacaataccagaaaagtttagcaaacatgaattcgtaaaaaacgcggaaactaaaaaagctcctttcataaaagaaaaagggggaattgaaggtggcatacgattacgaaaatcgaaaaggcaacgactactacgtggatcatggatcggaaggaaccgatatcacgcgtgatgtttattcagaagaaacagcggccgaaatttcagagccatatcgtgcttctgaccgggcagcagaccgtgatgataaccgggacggagtaagtgaaggccgggggatagggtatgcagcattggctatttctatcatttccctgtttgtgctccctgttttattaggggcatgcggcattatcgtcggctatatcgccagaagaagaggagcaggcgctttaggcggatgggcgatgggaatcggtattgtttcccttgtcctcggcatcttcattacaccgtttttttaacacaacgcaaaaaaaagcttggcggaatatccgtcaagctttttgtgtttcttgttctgcttttgctttttccgcttcaagctttgcgtagtgttcttctgccagcttgtcgatttcttttttcagctcttcgaccatggtttcttcagggactttgcggacgatttggcctttgcggaaaagaagtccttcgccgcgcgcgccggcaatcccgatatcagcttctcttgcttcgcccggtccgttaacggcacatccgagaacggctactttaatcggcgctttgactttagaaatgtattcttccacttcatttgcgatgctgatgagatcaatttcgatccgtccgcatgtcgggcatgaaataagcgtagccgcgtttgaagcaagaccgaatgatttcagcagttctctggctacttttacttcttcaaccgggtcggcgctcagagagatccggagcgtgtttccgattcctttgcttaaaatcgctccgagtccggccgcgctttttaccgttccggcaaacagcgtgcccgattctgtaattccgaggtggagcggataatcaaatgcttttgaagctttttcgtatgcttctatggctagattgacgtcagacgctttcatgctgacgatgatgtcgtgaaagtcaaggtcttccaggattttgatatgatgaagcgcactctcaaccattccgtcagcagtcggatagccgtatttttctaaaatgcgtttttccaaagaacccgcgtttacgccgatccggatcggaattcctttttctttcgctgcttttacgacggcttccactttttcgcggcggccgatgtttcccgggttgattctgattttgtcggccccgccctcaattgcttttaatgcaagcttgtagtcaaaatgaatatcgacaacgagagggatggaaatttgttttttgatgtcggcaatcgcgttagcggcgcgttcgtccggacatgccacccggacaatttggcagccggcttcggctaaacggttgatttccgcaactgttgcttctacgtcgtgtgttttggtcgtcgtcatactctgaatgacgacttcgttatttccgcctattgttaaaggtcccactttgacgggacgcgtttttgtacgatgtgtgatttcactcacttgtcaatcgctccttaattgtagttaccgcttttgcaggctgagccttttacatgtcaggcaacttctatttacatgttatattgtaacagtgtatttgccgaactgacaagaaattaacgtttaattgcggtagacggggaatttataagcggtgcctgcctgaattgcgtttgcttttacattcggattcagcgcttcaaaatcttgcgcaatatcatctggcgctttatgtgcgccgactatcgacatcaccgtatcgccttttttgaccgtaaccgttctgtatgaagattcctgtcgggctggctgtgccgccgctgcgtatgctggaaggtcttgagaagggatcgtgccgattttaagatcgtaaaagataatgaatatcacaaataaactgccgaatacaaaagtaagccgcttcattccaaccgcctcccgcatacatttttacttcattgtatgcttgtcccattttgttcatgacaaaaaagaagaccgccgggggcagtctttgttacacagctgtttttcttggcggtatctcttttaagacgaggaaaaggatgataaagtttacaaaccaattcactaaaaattcactcggcactgtaataacaagcgcgcgcatgatcgtaaagaatatggtcgaaagtgtaatggaataagccgaaagcttccagagctgcgggtaattcaatgtctttctttgcgcatttttcaatatcagtccgatgacggcgagaaatgatacttcaatgaattttccggccgctgtcatgatgaacagcaaaacggacaggacggtgacgatcattgttttattttggtttaatgctgatatgatttctttttttgtgatatcagcaggcatcagcgaataattcatttctgtcgcctgtccgtctacagcaagcaccattttatttttcaaaatgccgatcgcattttgtttcgccgctatttgtttagcgccgtaagcatctgtcggatcaaacacgatgacgaacccgttcgcttccgtttccttagaggcggacgctttcgtctgcaattctccgtttgaaatgctgaaatcagggaaatctttctttaacacggttttgaaaccgttcattgaatttacggtgccggagcaaaggtaataagcgcttggcagcgtaaaaaggacagacagcaaaaatacataaaggatcgcttttcctatcccctgaaaccgtgtttttgcaatatctgccggagagtatgtacttttcaataaagccgtaaatatgttcaacatcttcacttcctagcctaaactggtatatgttgcttattgtatcgttcacaggggatgaacacaagtgagagtatttaaagcggtgattaggaatcatacataataagataatgcgggaagcggtgatcgcccgcaaaacaaaggagggtgtttttgtcatgagtgttttgtattggctgatgatcattgcggtcttcgtcattgcttttatcgggcttgtatatccggtgattccaagcgttatttttattgtggccggttttcttctctacggatttttgttttccttcagtccttattcttacctgttttggctcattgaggcggtatttgcggccgttttattcgcagctgactatgtgtcaaatttacttggcgttaaaaggtacggaggaagcagggcggcaatctggggaagcacgatcggattattgatcgggcccttcgttattcccgtggcgggcattatattaggcccgtttatcggtgctctctgcgctgaggtgtttgttcatcaaaaggatatcaagtccgcggcaaaagtggggctcggctcgttaatcggctttttaacaagcgtggcggcaaaaggcgtcattcagctctttatgatcggatatttcttatggacggtgctttagaaaggtttaatttcggccgtgaacggataaagtgtaatatgtctgctggaatcgccggattgtgagctttttcattgattaccacgctttcttttgttacattgagattagaaaagttcgcgttaagcggcatttcagtacatatatttaaaggaggaaaaaattatggcttacaaacttccagaattgccttacgcttatgatgctttagaacctcatatcgataaggaaacgatgacgattcaccatacgaagcaccataacacatacgtgacaaacctcaacaaagcgatcgaaggatcagcgcttgcagagaaatctgtagatgagcttgttgctgatttgaatgcagtgccggaggacatccgcacggcagtccgcaacaatggcggcggacatgcaaaccactctttattctggactcttttatctccgaacggcggaggcgaaccgactggtgagcttgctgaagagatcaaaagcacgttcggaagcttcgatcaatttaaagaaaaattcgcggcagcagctgcaggccgtttcggttcaggctgggcttggctcgttgtaaacaacggcaaacttgaaattacaagcacgccaaaccaagattcaccgctttcagaaggtaaaacacctgttctcggccttgatgtttgggagcacgcgtactacctgaactaccaaaaccgccgtcctgattacatttcagctttctggaatgttgtgaactgggatgaagttgcccgtctttacagcgaagcaaaataattgagttgaatgatcacaaggtctcccgcgggaggccttgtttttttattgactttgattccttttacatatctcagtttgagtgagacaaactaatgtgtagtaaaggggagtcaatgatgagcaaaataaaaaaaattatcggcgacatcgaaataaataaagggctgctgctgttattgacgattggcggcctttactcattgggcatcgcgctgtcaaatacatttgtcaacgtgtatttgtggaagcagtcgggaaaatttattgatttggccatatacaatttgtcggtcgtgacgatgcagccggttacctttctgctggcgggccggctggctaaaaaaattgacagggtgtttattctcaggttcggcgttatctttttggccgctttttatttaagtgtgctgcttgccggagaaactgcggcttcccgtctcgttttgataggggccgtgctcggagttggatacggcttttactggctggcttttaatgtgctgactttcgaaatcacggaaccggaaacgagagatttttttaacgggtttttaggcattttgtcttcatcggcgggcatgatcggtccgattgtggccggatatgtcatttcaagacttgaaaacaatacgggttatacaatcattttcagcctgtcgctcggcttatttgcccttgccgtggtcatgagcttttttctgaagcggagggagtcgaaaggccggtttatgctgaaaaaagtttttgatgagcgccacacgaatctgaattggcgccggattaccaacgcgcacttttttcaaggcttgagagaagggatttttgtttttttaatcagcgtatttgtattcattgcgacaaacagtgagctggcgctcggaacattcggtctcgtcaattccgcggtttctttttttgcctattattttgcatcaaggctcatcaaaaaaagagcgcggaaaaaggcgattcttatcggcggattgatcttgtacggcgccctgtttctcatcatttttaaaatgagcttcacgacgctccttttgtacggagtgtttattgcgatcggctatccagttctgctcgtgccgtatgtctcgcttacatatgatgtgataggccgggcgcggcttgccagaaaagccagaattgaatacattgtgctcagggagttatttttaaatgcgggccggatcgtttctatcctttgtttccttgtcatcgttacattattcaaggaaaaagtggggataccagcggcgctcgtgctgctcggagccgggcatccgctgatttattactttataaaagacatcaaactggatacggaaacttctgatgaaacagtagaagaagaccgacaaaaacaggcggcggaaccgaattttataaaaggagaaagataaaagggttatctgtagaaaaatatcgaaaaaacctttagaatgaaaaatggcacctgaacagaaggtgtcatttctttctgtaaataagaaaaggtgatgtcatgaggagaaataaaaagaaaatagctgtaaacaaagaaaagaaaaaatcactgccgatccggcttaattttttgtttttggccgcgtttcttattttcacttggattatcgtcgagcttggcatcaagcagatcgttcagggtgatgattataaaaacgccgctaataagcaagaggagtctgatgtcagcacggcggttccgagagggaaaatatacgaccggaacctaaatcccatcgtaacgaataaagcattaaatgcgattacatatacacgttcagcctcaaccacccaggcgcagcgtttgaaaatcgcaaaaaaactgtcgggtatgattaaggtaagcaccaaaaaggtgactgagcgggataaaaaagactattggatgttaacgaggcctgatgaagcgaaaaaactgattacggccgaagaaaagcaaaaagctgaagacaaaaaactgtctgacgatgatttatatcagcttcagctgaaacgcatcacacacaaacaactgaatgagctcacttctaaagacatgcagatccttgcgatcaaaaggcagatggattcaggctactccctgacgcctcaatacatcaaaaatgaaggcgtgtcggcaaaagaaatggccgtcgtcagcgaacatttagatgaactgccgggagttgacgtgacgtctgactgggaacggtcttatccttataaaagcctgatccggacattgctcggcagtgtatccagttcgaacgaaggtcttccgtccaacctgctggatcactatctgtcactcggctacagccggaatgacagggtcggaaaaagctatttagaatatcaatatgaaagcctgctgcagggtcaaaaagagaaagtgcagaacttaaccgactcatccggaaatgtcacgggcagcaaagtgatttcaaaaggacaggccggcaaagaccttgttttatccattgatatggacctgcagaaatccgttgaaaaaatcattgagaaaaatttaagatcggcaaaagcgagaccgagcacgaagcttcttgatcgggccttcgtcgtcatgatgaacccgaaaaacggagaagtgctgacgatggccggcaaacagattacgaatgaccatggaaagtacaaaattaatgattatgccctcggcgcaatgacttcctcctacgcaatgggatcggcggtcaaaggagcgacggtgttgaccggactgcagacgggcgcgattaatttgaacaccgttttccaggatgaacctatgtatttcaagggaagcaaaaacccgaaaaaatcatggacgaatttaggtcccgtagatatccaaaaagcgcttcaggaatcgtcaaacgtgttcatgttcaaaacggcgattgccgtcggtaaaggggaatacaaaaaaggccagtccctgccgcttgatatgaaggcattcgatactttcagatattacttcaatcagttcggactcggagttaagacggggattgatcttccgaatgaagcgaccgggtaccaagggtcacagcgaatttccggtcttctgttagactttgccatcggacagtatgatacgtttacaccgctgcaaatggcgcagtatgtatctacaattgccaatggaggctatcgtttgaagcctcagcttgtaaaagaggtcaggcagcctgattcgaaaaaaggaatcggagccgttgtagagtctgttcagccccaagtactgaacaagattgatatgaataatgcagacattaaagaagtgcaggcaggtttcagacgtgtcatgacaaaagggacagccgcaactgattttgcgacggcgacatacagtcctgccggtaaaacgggtacggcacaatctttctatgacggtccggacaaatcagagacgggtgaaggaacgtataatacgactcttgtcgcttatgcacctgcggataatccggaagtggctatttctgtagtcgttccttgggcctatattgattacagcgatcgatattcgattacgaatgatataggaagagcagctctggacaaatactttgagctgaaaaagaaacaagaagataataatacgaagcagaaaaacgaagataaaattcaggaagacgctgaaaacggcaatacaaatcactaacagaaaaacgctcacaacttgtgagcgttttttttatacaaaaaaacatccggatttacaaaaccttaacacttgatttatacgcattttacaagaaccctttactctagacctgtaggacaaattacacattaaatgcagggggaattcaggaaatgaaaaaaaacaaatggatgcttatgcttctgatggctgctgttatgattgttgctgcagcatgcggaaatgcaaaggaaagcggcaagacagacagtcaatctgcaagtgaggataaaaaagcatcaggttctttaaccatttctggttcatcagccatgcagccgttagtactggcagcggcggaaaagtttatggaaaaacatccggatgctgatgtgcaggtgcaagcgggaggttcaggaacaggtctttcgcaagtgtctgaaggggcagtgcaaatcggcaactcagatgtctttgctgaagaaaaagaaggcattgatgcaaaagccctaaaagaccaccgagtagcggtagtggcgatggcggctgcggtcaaccccggtgcgggcgtaaaggatataaccaaaaaacagctgacagacgtctttacaggcaaaattaaaaactggaaagagcttggcggtaaagatcaaaaaattacactcgtgaaccgtcctgattcatcaggaacgcgcgctacgttcgtcaaatatgctcttgacggagcagagcctgcagagggcatcacagaggattcctccaatacagtcaaaaaaatcattgcggaaacgccgggagcaatcggttatctggcattctcttatataaacgatgacaaagtaacgcctttatcgatcggaggcatcaaaccggaagagaaaaacgtcgtcacaggcgagtatccgatttgggcttacgagcactcttatacgaaaggtgaagcgtcaggccttacaaaaacgtttcttgactatatgaacagcgatgaagtacagaaaagtatcgtaaaagatcaaggctacattccgatctctgatatgaaagtcacacgtgacgcaaacggcaagcaaagctgaggggagggcgggctccccgcctcttcttccttataggagtgtaaacaaatgataaatcacagagaaaaagagtctgtaagcgaacgcttaataagctcaaaacaaaacaggcaaatggatgaagtccgcggaagggtgattgtgtctgtgtgtgccgcgattatcattgcggcatcagcggcgatcacaatttttctcggcattaaggggctgcaatctttttttgtaaatggtgtaagcccgattgagttcttaacaagtctgaattggaatccaacccaggcaaaacctgagttcggcgcgctgccttttattttcgggtcatttgcggtcacggttctgtccgctctgatcgcagcgcccctcggtattgcgggtgccgtgtttatgacggaaattgcgccgacttggggaaaaaaggtgctgcagccggtaattgagctgcttgtcggcattccgtccgtcgtttatggattcataggtcttacagtattggttccgtttatcggctcttttaaatcaagcggaacgggtcacagccttctagcggggacgatcgtactctcggtaatgattctgccgactgtgacatcgatttccgctgatgcgcttgcgtcacttccgaaacaccttcgcgacggttcatatgcgcttggtgcgacgaggtggcagacaatcagaaaggtgcttatcccggcggcgtttccgacattgatgaccgctgtcgtgctcgggatggcaagagcgttcggagaagcactcgctgtacagatggttatcggaaatacaaagcttctgccggaaagcctgcttgatacggcgggaacattaacgacgattattacgttaaacatgggccataccacatacggcagtattgaaaataatacgttatggtctatggggcttgttcttcttatcatgtcgtttctgtttatattgctcatacgctacttgtcatctaggaggaaagtgtaatgaaccggaaaataacggataaattggccaccggtgtattcgggttatgcgccgctgtaatcgcggcgattttggcaggattgtttttgtacattcttattcacggcgtctctgaaatctccttgcattttcttacgtcaaaatcgagcgccattgcgtcaggcggcggaatacgggatcagctttttaactccttttacattctgtttatcaccatgctgatcacgataccgcttggagtggggggcggcgtctttatggctgaatatgcgccccaaaataaaatcactgattttatcagaacgtgtattgaggtgctgtcttcgcttccgtccattgtcatcgggatgttcggcatgctgatgtttgtaaacctgaccggatggggttacacgattatcgggggcgcgctcgcgttaacggtctttaaccttcccgttatggtccgggtgacggagggcgcgctcactgcagttcctaaggagctgaaagaagcttctctcgctttaggcgtatcgagatggcataccgtcaaaacggtgctggttccgagtgcgattccttcgattttgaccggagccattctcgcatccggaagagtatttggagaagcggccgcattgttatttacagcgggactgacaacgccgcggctgaactttacggatttgaacccgttttctgaatcatctcctttcaacattttcaggccggctgagacgctggcggttcatatatggagtgtcaatacgcagggaatcatccctgacgccgaagcgattgcaaacggcggctccgcggtgctggtgatttcggtgctcttgtttaacctttgtgcaagatggctcggatctgtcatttataaaaagcttacggcaaattaatcggaaagaggcgaaaacatgattgatcacatcatcagggaacaagcggaacagacaaagcgttcgccggagtcttcaattttggaagtgaagcatttatcaatttattacggtgacaaacaagcggttaaagatgtgaacatgaatattgaaaaacatgcggtgacggctctgatcggtccgtccggctgcgggaaatcaacatttttgagacagattaacagaatgaacgatgccatcccttcggcaataagcgagggagagatcctttatgaagggctgaatattttgggggaagcgattaatgtcgtgtctctcagacgggagatcggtatggtgtttcaaaaaccgaatccgttcccgaaatccatttacaataacatcacacatgcgctgaagtatgcgggggaacgcaggaaagccgttttggatgatgcggtcgaggaaagcttaacgaaggcggcgctttgggatgaagttaaagaccggcttcattcatcggctctttcgttatcaggcggccagcagcagcgtctttgcatcgcccgtacgcttgcgatgaaacctgccgtgctacttttagatgaaccggcctcagctctggaccctatttcaaacgccagaatcgagacgcttttgacagaactgaaaaaagattattcgattattatcgttacgcataacatgcagcaggcacttagggtgtctgaccgaacggctttctttttaaacggggaagtggtggaatacgggcagacagaacaaattttcacgagtcctaaagcgcaaaagacagatgactacattaacggaaagttcggatagggggaaggactgtgagccttgtgaaggaagcggtgcacacacagaatttatttgatattcacggcatgaacgtatggtacggagcccaccaggctttaaaagacattacgatcggttttgaggagcggaaggtaactgcgatcatcggtccgtccggctgcgggaaatccacttttattaaaacattaaacttaatgctgcaaatggccccgaatgtcaaagtgacaggcgacatgatctataacgggcgcaatctgctgaaagaaaagacggatgcggcagaattaagaaaacagatcggtatggtgtttcaaaaaggcaatccgtttccccagtcaatatttgagaatgtcgtgtacggtccgagaattcacggcgaaaaaaataaaaagaaactgcttgaaatcgccgaggaatctttaaaggcagctgcgctctgggatgaagtgaaagatcgccttcaccagcaggcgctttcactgtcaggcggtcagcagcagcggctgtgcatcgcaagggcgctcgccacaaaaccggacgtccttctgatggatgaaccgacgtctgctcttgatcccgtgtccacgcggaaaatagaagagctgattttgacattgaaagaaaagtatacaatcgtcattgtgacgcacaacatgcagcaggctgcgagggtctctgatcaaaccgcgtttttctatatgggcgaactggtagagtggggcgatacgggcaaaatattttctcagccggatcatcaaaaaacacatgattatatcaccggaaaatttggataaaaaaacgggcccggccattgaccgggtccgttttatactgcctattaaaaaagcctgccggccgtatccatctgaatggacgatgcctgcaagcttttttagcgggttaatgttttgacgatttttttaaagctcatatctgagtcgactttgaaatggccggcgcggatttctttatggtagcctgcgtcaatgacgtaatcattaaagtcctttgctgaaggaataatcccttctttttcaagaatggatgacacatcagcagtgctcattccgtctttaatcgtcagtttgtatgttacttttttctttttggcgtctgtgttttggtcgttgtttaacgatttttctttagaatcaagcagtttttgatagtcatcccggttgacggagactttttgctgatcgtcgaggtagctgtttacttctttttctgtcaatgctgttttttcggttttaacggcggctgcctggtcatggtcagtcaaatagaagacagcggcgagaacggccgtcgctaaaatcatgcctgctgcaaaagcctgaatgccccgttttgtcatacgagcaccttctcattatctttaataatggtattgacgtcctcgacagacacgtgctccgcttttgcgatggcttccgcagacattccgttgttatattttgaaatgatttgtttggcgattttttggttaatgccgctgcttttggctttgcggatcacgaggttggtttccagcaattcttcttcaagcaccgtcattttctttttcaacttgtaaatttcctgcatggcggaaagctgaagcgtttcaagctcctgttccacgtctttcatcggatctctttgagaatatgagaatgcaataagcgctatactgacgataaacaacgcaataatagcaatttccacgtttcatcaccttctattattaatttgcccttcttttttataccataaaacgccgccattctaaaggaaatagagaaaaaaacggaattttgtcgggaaatcttttttattcggggagcaaacggttatttctctatagatttcgtatcagaaagtccttttttgtcctgtttcgtcatattttcccttcatctgacgcaagctcattcagaggatcagaagcataaactgatgttttctgcacttaaacaacatttcatgtaaatcactctagcattccgtccattatagtggtattatatataagtctgaataagtaaatgatatttagtttggagggaaaataatgcgcgttaatattactttggcttgcactgaatgtggtgagcgtaactatatttctaaaaagaacaaacgcaacaatccggaccgcgttgaatttaaaaaatattgcccacgtgataaaaaatctacgttacaccgtgaaacaaaataagctgtttaaagcagcggaaaaagctggagctttcaataaagttctggcttttttgtctttcagggaggtttgagaaacgtgaaagcacaaatcagaaccgctataaaagcaaagctttctgacatgacagaaagtgaatgggagaaaaaatgccgcagcatgcgtgaaacgctgttttctttaaaagaatggaaacaggcccgcgtgatcgccgttaccatctcgacacgcctggaaattccgacacagccgattattgaacaggcctggaaagagaaaaaacaagtctgtatcccaaaatgctttccgcagacgggagcgatggagttccgtacattttctgcgtatgatcagctggaaaccgtatatgcgggcctcagtgaaccgatcgagagcctgacggaaaaagccgcccaaacagacattgaccttgtggttgtgcccggcgtggcttttgaccgggaaggcttcagaatcggatacggcggaggatattatgatcggtacctctccggttataaaggccgtaccgtgtcgcttctctttgactgccagctgacagaccgcattccccgcatgccccacgatattccggtcgatatgatcgtgactgaatctgaaaccatcgcttaatcgcataaaaaacttcttgcaccggaataattctcgctgtttgacaaacgataggggcaggagggataagatgaaaaaattgttgatctactcattatgcgccgtatctgttttagccgtttaccaaaaccgctaccgtctgatgaacagcgtgctcagccagccggggatcagacggtcattcattcatttctttttaaaaataccgtttatcagaaacaaattcattcagcaggcattttaaacaaatcccgtttttcagcgggattttttgcataagaaaacctgccggtaaaaaacggcaggttttctcgtattgtcagctctttttcaggaaaccgagcagaattgagatcataggagaaatgtacaggaaaaaggtaaacggcaggtagtcgatgacggaaacccctaatgcgcttgccataaaagcgccgcttactccccagggaatcagcgggttgatcaatgttccgccgtcctcaagcgaccgcgcaaggtgaatccgcttaatgctgagcttgtcatataaaggtttataagattgacccggaattaagatcgacaaatactgctcacctgtcgcaaggtttacgcctatacttgagaagacggtcgccatgacaagacgtcctttcgtatgcacgccttttatcaatccttgaagcagcgccgcgatcaggcccgttttttccatcaggccgccgagcgcaaaggcgatcatgatcagagagactgatcccatcatcgattggagcccgcctctgttgataatgctggccacagcctggtcgccggttttaaacgccgtcccgctttgcagggcggatataaatccttgaatgctgctgtcaggaataaaaacagcagtcagaagccctgcggaaataataccggcggtaagcaccggaatcacggaaacccgtctcacagctaaaatgatcaccagcagaggtgaaagaagcgaccaaggcgtaacgtgcacggcctcttttattccggaaatgaccgcctcaatattttgcgttgaagcggcatttattgaaaccgatgaaccgagaatataaaaaagaacaatcgtgatcagaagtgccggaacggtagtgcccatcatatggcgaatatgcttaaaaatcggaatttcgccgattccggcggcaaaattcgtcgtgtcggacatcggtgacattttatcaccgaaacaagccccgcaaatgactgctcccgccgtccattcgagcggaactcccgccgcgcttgctacccctaacagcgcgacgccgattgtactgacagttgtcagacttgagccgacaagcgtgctgataatcatgcaggaaaataatgcagtcaaaagcagctgactcggctgtataattgacaaagcataaacggtgacggtgggaatggcgccgctgtacatccaggcgccgatcagcacaccgatcaaagccagcacgataatcggctgcacaccgtttttcaatccgctgacaattcctttttcaagactgtcccacgagaaaccgagccacaaacctgccagagacagaataatgacgcaaaagaacagcggcatatgcggctctgtatgaaagaaaaacaggcaggaaataatgactgctaacatcaagacaaataaactgatggctgagatgaacgtcagccttttttcttgtttcaaaacaacaccccatcaaactttaatccttttgtgcttttgggcacgaaagtattgtaacagaaaaacgcataaatgagtgtttttttacaattgtgaatatacaatttatgaaaataatacaaggatattttctccaatcgttttttgcttgacgcccggatcagtgatgaaatacgcttatactaagaagaatagaaatggtgaagaagatgaattcattttatgacgtgcagcagctgtttaagtcattcggacatatcgtttatttcggtgacagacaagccgaaattgactttatgaaagatgaattaaaggaaatgtacttgtcaaacgtgattgaaagagaattatggcaaaaagccgccggagttcttcagagagaatcggagcggatcaaaggcagataacacagcaggattttaataagaaaaggagattattatggaagatacatggtttgcggggattgatcttggcggaacaaccatcaagctggcctttatcaacatgtacggtgaaattcagcataaatgggaagttccgaccgataaatcaggaaacacaattacggtcacgatcgccaaagcgcttgatcagaagctggaagaactgaacaagccgaaacggatcgtaaaatggatcggaatgggagcgcccggacccgtggaaatggcgacgggaatggtctatgagacgacaaatatggggtggaaaaactatccgctgaaagaccatctcgaggcggaaacgggtattccggccgtcattgaaaacgatgccaatatcgcggcgctcggagaaatgtggaagggtgcaggtgacggggctaaagatgtcattttagtgacgctcggaaccggagtcggcggaggcatcatcgtcaacggagaaatcgttcacggaaaaaacggggccggcggagaaatcggtcatatttgcagtattccggaaggaggagctccgtgcaactgcggaaaatccggctgcatcgaaacgattgcgtccgcaaccggcatcgtccgcatcgcgaaagaaaagcttgcggcggtttccgactcttcgctcttacaagtgcgcgatctgacagcacgtgacgtgttcgatgcggctaaacagcaggataagacagcgcttgaagtcgtcgattatgtcgcaaaacatttaggcctcgtgctcggaaatctggcaagcgccatgaatccgacgaaaatcgtgctcggcggaggcgtgtctaaagcgggtgaaatcctgcggtcaaaagtggaagagactttcaaaatcaccgcattcccgcgttctgcggaagcggcggatatttcgattgcggcacttggaaatgacgccggagtcatcggcggggcgtggattgccaaaaatgaatggctcaaacatcaaaactgctgaagaaagtctgcctgcccatatcgcgggcggctttctttttttatctcccctgtcatatagtttttaaaaaagggggatgaacatggcgggaattcgtgtcaaacctgaattgaaacagcatatgaaagatattgcaaaggtgctttcaattgatgaaaaactgttgaaagccgctgataaaacggcggaaaatgatgaattattttgtcccggctttgccgtgagcgggcagtcagagggtccgccgcttgagacgctgagcgggctttcgcgatacatccggcactgtgaaaggattctttccgctgatcaatgggtgaaggaagaaaaggtgtacggctcccaatcggtttatgaagaaattgagaaaataacggatgtctttccgtttgtcacgtgccgtaaaatcggcagttccgtattgggaaagccgctttatgagctgaaaataggtgcggatacggccgaaagaaaagtccatgtaaacgcctcatttcatgccaatgaatggatcaccacctcggtcgcgcttaaatggtgtaaagaatattgcgcggcattatgcgaaaataaaaccgttttcgggcactctgcgcttgatatattcagccggacatcattgtcattcgttccgctcgtaaatcccgacggtgttgatctcgtactttacggatgtgaagatttatcagaaaaaaatgaatttcttaatgaattaaatgagcagcgcccggatttccgcgaatggaaggcgaatataaacggtgtggatttaaataaacatttcccatccaattgggatattgaacagaggcgcaaaccgaaagccccttcataccgtgattttccggggacggcgccgctcactgaaccggaggcgcaggcaatgcaccggctgataacgaagcagccgcctgacaggctgatcgcgcttcatacgcagggagaagagatttattggggatacgaaggatgtgaaccggagcaatcatcccggatgattcgggagtttgaagcgataagcggaaaccgctatcaaggcgttaaaaccattgacagccatgccggttttagggattggtttatacagcagtatggaaaagagggctataccattgagctcgggaagggaaaaaaccctttgccttttcatcagtttgctgatatttatcaagcgacggaaggtattttgtggaggtcgcttgttttttgagacatctgtgaaatttctcatttgtttacataaacaaatatgggacaatagaaaagaatggagggaaggctggtgagatacttggtttgtgttctgctgtccgcattcgttctgtgtttagcggcctgtgaaccatctcatcagcagcaagacacaggcgtttcggcaaaatcggcagaacagaaaatcgttccgctcagtaaaaaggaagcggagaaaacggaaggatggctggataacagaacgatcctgtatacagcacatcatcagctgatgaaatatgatcttttcagcggaaaatccgaacggctctatgaaacaaagggcaatattgtcaatgtaaagatcagccggaaaaaacagctgattctcgtacaggtgacaagcagcggtcagactgagcttgtgcttatgaacaagcaggggaaaagactttatcacaaagcctttaactcttatgagctggagacggcttggaatccgtatgacccgtatcaaatgatgattaccgtttttactgaaacatgggacttcactgcctatacggccgatatgaacaacggcattttaaaaaagagtcccgttcaggccccttttgtccattggacctccactgatgaattccaatatatcaagcaaggaaaaacggaggaagagggtcctttatattcttatcacttgcagacaaaaaaagaaaaaagagtgcttcatcacgtcatctgggccgattcccgcccgggcatgacgattgccgtcagacaaacggatcaatcggacggagacggcgagttccttttccaaaagccggcatccgtgacgcaccgctttcctctccaagaaaagtatcagagctttgcgccgatggaatatgattacgatcagacacacaagcggttttacatattcaagcctgaaggccgctcttacaatctgatcagctttgacttaggagacgaacgggagcggacggtgctcaaaaacacggaaatggagccgattcagatctctccgaacggggaatacgctttatacggctttacgtatgaccgtctgatttcactgaaaacaggcatgacagaaccaatcataacaaatgaaaaaggagtttgaaccaaatggcaattgcagatgtgacaatcattccgatcggaacaaaaacaccgagcgtcagtgagtatgtagcggatgtgcaaaacattttggagggttacaaagctgccggcaaaatcaaatttcagctcacgccgatgaacactttgattgaaggtgagctgagcgacttattcgcagtcattcaggacattcacgaagccccgttccaaaaagggctgcacagagtggcgacaaatatccgcattgatgacagacgtgataaagaaacgacactggagagcaaaatcaaaagtgtcagcaaacatttgcagcaataaaaaataagcctgtatccattggatacaggcttttaatgtgcagtcggatagccgctggttacaacggtcattacggtaaaccagccaaacacgcccagcgtggcggcggctaacaaaaatcccaggatatttctctgtctgacagcccgcaggactcctaatacagctaataatgcgacaaggccgaagattacaacaagtaacatcatgctcctcctttgtcattggaacctgaaaatctttccatttcattttaaccgttttcattttgtttgtcgatagcgttttcccggccgcattcattgaatcttccgcagaaaaccttcataataagggcatatacataaagaggtgatgaaagtgaaatggagacgaatgccggccggtccgattcaggcaaacgcgtattttcttgtcagtgaggatcagtcctgtcttatttttgatccgggcggagaagcggacaaaatcaacaattacataaaagaaaacaatctgaagccgctggccatcttactgacgcacgcccattttgaccatatcggcgcgcttgacgaagtaagagacagatgggatgttcccgtatatcttcacaaaaatgaagaaaagtggctggaggactcttccttaaacggatcgggcatattgcggggcatcgccgtaacggcacggcccgccgaacggctcatcgaaggcgacggcattttggacatcgggcctttccatttggagacattgtttacgccgggacattcaccgggaagcgtttcttattatgtgaaggacgcggatctggtgatttcaggtgatgtgctctttcagggaggcatcggccgaactgatttacagggcggaagtcaggacgtattgcttgattccattcatcaaaaactgctcacgcttcccggacatacacttgtgttaagcgggcacgggccggaaacggatattcagacagagcaggagcgaaacccgtttatcaatggtttttcactgtaaatgaaaaaagacagaccataacggtctgtctttttctgtcagtgggttccgccgcccggtgtcataataaaaatagagtaatatgtaaatccggcgaaaaatacggttaagtaagctccgaaaatataaatatacatccgctcagtcagattcaaataagaaagaaatacgaaaaagatcgtctgtccaaaaaacaaaagtgaagcgtctttcatgccccctaaaaaaaacataactgcaaatatccccgtccaaaatcctaacacccggaacatgcgattcattccttatcccctcccgagagtctatctgaagtttattataatagatcggcactcgaaatgtaaacattttcatgattatatttattgtggaatttatgtctttccctgtgttttatatcttatgccgctctctgaaaaagatccgaaaaatctttttgaaatatgtttaatgaaaaaaagttcagggtacttatgttaacaaagagacggattatccgagggaggaatttttaaaaatgaaagaacttattttttattcatacccgagctgcacatcatgccgaaaaacgaaacattggttaaaagcccacaatgttgactttcaagagcgccatctattcagggagacaccgacaattgatgaattgaagcagatcttatcattaacgactgaaggaattgatgaaatattggcgacgagaagtcaaacatttaaaaatctcaacctgaacattgaagaaatgactgtaaatgaagtgctgaagcttttgactgagaagccgaaactgctgcggcgtccgattctgatcgatcgaaataagctcgttatcggatacaatccgggagaactgatgaagctgacgaagaaaaaaacggtacatcaatctgtatcataagagaaaaacgaagatccgctgatcaaaatttatcagctaatcttcgttttttgcggttgcgggactgggctagctggattcgaaccaacgatcacggagtcaaagtccattgccttaccgcttggctatagcccatcggatgtaattacagtatgtgcgtccggcgccgatttatacatacaaaggaatttgaatggaggagacccgtgaaacatttgagtgaaacattatctcgaaccttaattgaagaatcaggtgaaatcacacgccagtggctgctcataccaaaatcggggcggcctacagatgatcagaaagcggaaatgcagcaccgtctgttaattgaaatcgttgccggcattttatcggaaaaagacggcggggaagaggagctgacaaaatgggcgcttcagttcgcaagggaccgggccgtccatgaagtaccggtctatgaaagcgtcacgagctttaaagaattccggagattggtctggaaccgcatacagacgtgctgtgaaacaatgtctgagaagcctggggcgaatgcggtattccattggggagagaagctgaacaaagcaattgaccatatgattgaagtatttacagaggaatattataaagtgacggttacacaattaaacgcccaaaaagaaatgattaacgaactaagtgcgccgattatgccgattgccgacggtattggaattttgccgctcgtcggcgaaattgacacctaccgggcaaaaatgattttggaatcggtgcttgaccaatgttcttcactccgtctttcttatttatttttagatatatcaggtgtgccgattgtggatacgatggtcgcttatcagatttttaaagtgattgacagcacaaaacttcttggcatagaaacgacaatctcaggcatcaggccggaaatcgcgcagaccgtcgtgaagctcggcatcgatttttctcaggtgaaaacggagcagagtctggcgaaagcgctggcaaaaaacggatttatcgtaaaagaatcattaagatgataaaaagctgaatggccgggagggatgtctccctcagctattcagctttttcagcttcaatcgtaatgatatgatggctgtcgatttcttttaccgtaaatgtgtagccttcaaaatcaatggtgctcccgggcttcgcgtcaatatgctgagtaagaaaccagcccccgagtgtatcgacttgatcagccgtaatctctgttccgagtacatcattgacgtcgctgatcagcaatttggcgttcaggagatagcggttcttcccaagcttttgaacggaaggtgtttcatccgtatcaaattcgtcgcggatttcgccgacgatctcttcaatgatgtcttccgccgttactaatcccgcggttccgccgtactcatcaatgagaatggccatatgggcgtgttcccgctgcattttaacgaataattgataaatcggaatcgtctcaatcacatggatcgccggctggatgtaagggctgagttcgtgttttgtaaacgccgctccttctgacaggaatctgaataaaacttcttttatattgatgatgccgactacatgatctttatctccttttactacgggataccgggtatatttatttgttttgataatgtcccggagcatatgtcccgatccgctgtctaacggcagactcaccatttcattccggggcaccataatttctttggcagtgcgcttatcaaatgtaaaaatgttatttacgtaatgcagctcgctttttttaatcatgccgcttcgatagctttcggcaaggagcacccgcaattcctcttccgtataagccatttcatgttcggaagcaggcttcaagccgaacatggctgtaatcaggcgggcggaatgattgagcagccagatgaacggaaacattaacttataaaacaaaatcatcggtctggcagacaaaagtgtaatccgctcggctttttggatagcaaaacttttcggggcaagttcgccgataacgacattcacatatgtaaccagcagaaaagcgatgatcaatgacaggacttgggcaaccgcttcgtgaactccggtctttaaaaataacggctgaagcatcgctttgactgtcggttcacccagccagccgattcccaaagcggtgacggtgatgcccaattggcatgccgataaatattcatcgaggtgtgtaatgacatgcttggctgcttttgctccttttacatcttcctcaatgagctgattaatgcgggagcgccttgctttaacgattgaaaactctatggcgacaaaacacgccgttaataaaataaatagtacgatggcagacagtttgatgatatacaatgtaacgccttccgcgaaggaaggcttgcacctcccttttttcggaataataccactgtagaaagctgctcaaacatcgaacctggtttagcctgcttcatttacggtaataaaacaagaaagcgatactggaggatgacaagagatgaaggtacattcgggtgcggactggctgtggtaccagctcggtccgcatgaaaaaacggaagcgaaaaaaatgatccaccacaatcactggccgcaatgcgaaaagtggtttgaacatgaaaatcatataaactttctgcgctcagatacaaatgatcagaataatgaagcggttttcggttctttaatctatcatcaaggattagatgatgaaaaaaaccataccgtatttcacttttatattacgagagacttcttttttacaattaattttgatttttcgctgctgcgcggtgtaaaagaaaagcatgccacacagcagatccaaacctgtgaaaatccgattgaaggcttttttgttctgctgggagagctgatgaattcctatctgatcggactggatgaatttgaagtcaagcagcggacgctgaaatggcagattcatgatgacaacagcaaaggaatcttggaaaatgtgcataaactgcgccatgagctgttcatttggaaaggccttacactgggggctaaaaaagtggaaatggctttaaaagaagcttttctcccgaaaaatgacaggcagaaagattacctcagagctcatcaaaagatggaaagaggaattacatatatcaatgagtttgatcaggaactgagcaatctgctgcacgccgaggaagtcattacctcccaaagaggaaatgaaattgtgaaagccttaacgatctttacaactctctttacaccgatgacggcgcttggagctctctgggggatgaactttgataacatgccggagcttcattggaaatatgcgtatatttgttccatcgtgctcattattgtatcaaccctgctgatttatatttatctgcggcagaaaggctggacaggggacattttgagggagcatcaaaaaaaatatttgcggaaagaaaagaaacgctaagaagagcaggcatacgcctgctttttttgatggctggctgaaaatggccgaatggttcccgagttcattcggtaaatcagagtcagggggcttattttttatttttttacgttttacacactgtaaaacgcataatctctcctttgccggcttctgtgtatctgatttacaatacgtgcggaaggagggaagtcttgtgaaaaatattgaaacatacagcaggaacatcataaacgaggcctatacggcaagggcttcagatatacacattgtgccgagagaaagggatgctttcattcattttcgcatcggccatgctcttgtgaaaaaaagagtcttaaaaaaagaggaatgcgtaaggctaatttctcattttaagtttttatcggccatggatataggagaaagacgtaagccgcaaaacgggtcattgtctctgccgcttccgacggaaaccgttcatttgagaatgtcaaccttgccgacaatgaatgatgaaagtcttgtcatcaggcttttgcctaagcggcagattccccctctggataaattgtccttatttcggggggcgggcgccgcactattgtcctttctgaagcattcgcacggcctgcttctgtttaccggccccaccggatctggaaaaacgaccactctttactcgcttgtcaactatgcaaaacggcatttcaaccggcgtattgtcacgcttgaagaccccgtagaaacaagagatgaggatgtgctgcaagttcaggtgaatgaaaaagccggagtcacatattccgccggtttaaaagcgattttaagacatgatcccgatatgatcatcttaggggaaatcagggatgccgagacggctgaaatcgcagtccgcgcggccatgacgggacacctcgttctttcaagcctgcatacaagagatgctaagggcgccatatacaggctgctggagttcggcgtgaacatgacagaaattgaacaaaccgtcattgctattgccgctcagcgtctggttgatttaacatgtccgttctgcaaagaggaaaactgttccgtgtactgccggatgtacaggcagacacgccgtgcgggcatttatgaattgctctacgggaaaaacctcacccaatgctttcaggaagcaaagggagagcacgcgaattttcaatatcagacgctccgcaggctgatcagaaaaggaatcgcgctcggctatgtcacgaccgacaattacgatcggtgggtgtatcatgaagcggattaaccgaacctggcccttgaaggatcaagcggcttttttgaaaaggctcggtgaaatgacggaaaaaggatacagtctgattgaagggctcagactgctgcaactccagctgcataaacgtcagcttgcagagctgacggacggaatccgccggctgagggaaggtgatgcgttttaccaagtgcttgaggcactgtcttttcataaagaagccgtctctatctgctatttcgctgagaaacacggggaattgccgggggcgatgaaacaaagcggcgacttgttacagagaaagctcatgcagacgaatcaaatcaaaaaaatgctccggtatccgatgtttttaatatcttccgtctgtgtcatgttttatatcctgcaaagtttaattattccgcagttttctgggatttatcaatcaatgaatatgaatacatccggtacgactgctttcatctttgcgttttttcggcattttcatgaagcctgcgcactggcgctgtccgccgctttctgcttgtttttgtacgtttggttcttatgtaaaaaaaaatccccgcaagataaaatgctgattgttgtgaaaataccactattaggaaaagcggccgttctttttaacagctactttttctctttacagctcagcagtcttctgaaatccggcctatctatctatgacagcttaacagcttttaaagaacaatcttttctgcctttttatcgtgaagaagcagagatgctcattacacgtctgaaagccggagaaaccatagaatccgctctttccgggcatccgtgttatgaaaaagaccttgcggctgcagtcagccacggacaggcaaacggcctgcttcaccgcgaactttatacgtacagccagtttatgatggaacgtcttgaacaaaacgcggcgaagtataccggcattctccagcctgtcatttacggtgttgtggccggtatgattttaattgtctacatgtcaatgctgatgccgatgtaccagatgatgaaccaaatgtaagggagtgcttcgtctgaaaaatcaagatggatttactttaattgaaatgctgatcgttttatttatcgtttccattctgcttttaatcaccattcctaacgttacaaaacataatcaaagcattcagcataaaggctgtgaaggactgcagaatatggtgaaagcccaagtgacggcgtacgaaatcgatcatgaaggtaaaatgccggatatgaacgatttacaatcagaggggtatatcaaaaagaatacagcctgcccgaatggtaaacagatcttaattagtggcggagaagttacagttgaacaataacaggcggacagaaaatgggtttacccttcttgaaagcctgattgtgttaagcctggcgtccgtcctgctgacggttttgttcacgacggttccgccggcctacacccaccttgccgtgcggcaaaaaacagaacagctccaaaaagatattcagcttgctcaggaaacggctatcgcagaacataaaagaacaaaaatcacttttcttccaaaagagcataaatacaaactgcagtcaggcggaaggattgtcgagcgttcttttgactcgcttcacattacacttgtgactttaccggagagccttgaatttaacgaaaaaggccatccgaattcgggaggaaagattcaattgaagagcgccgggttcacctatgagatcacagtttacttagggagcggaaatgtccatgctaaacggaaataaggggttctctactattgaaacactatcagcaatggccatttggctgttccttatgacgtctatcattccggtctggacgggcatgctgacagatggtctgaaaatagaagatcgccaggaagcgtaccagcttcttcagaaacatatcagcacttatatgatgaccggaaaaaagccgccgtctcccggtgtgaagtggaaggaggatggtgagtattacaaagtgtgtacggctgaccgcagcgaaaaagaaatgtgcctcagcattctcaaaacagactggctttacgcttcttaatgttttgttctccttggcagtctgtcttttcctatcaggcaccttgggcccgattttacatctgtttttatcaaaccgggccgataacggcggattagacagccgggagcatcaaattgccgttcagcagatcatgaacgaatgtaaacaggctgaggctgtgaagccggcggacggcggacgggcgttagcatgccggaaaaccggaggcgaagaagtgcgttttgaaatttatcataagatgataaggaaaagagtaaacggaaaaggccacgtgccgatcctgcaaaacgcggcatcattaacggctgatgtgaaaaacggcctgctcttattagagatctcaagcgttgcaggtcaaaagaatcaggcggtcattccggtttacagctcttttaaaggtgattaaatgtacaaatctgacggttttatatatcccgcggttctgtttgtttctgccgcagttttacttgtcatcagctatacttcgtctgatttcatcacccgaaaaacatttgcaaaagaggccggggagtactggatcggagagaatctgctccaaaacggcgtgctgctgtcaagccgccatatgacacagggacaaaaggtccaaactggtacacagcgttttccgtatggcaccgtttcttttcacatcacggggagtgatcgccgggaaacggttcaggttacaattcaggcggaaacaacgacaggaacgagacgggaggctcaccttttgttcgatcagaagaagaaacagctgattcaatggacggaagtataaaaaagaggcggcgggacaacacttcatagtaaagacagcactatgaggtgagagccgtgaaaacaaatgattatgtaaaatatatgactgagcaattcgttaaatatttcgatacgccgaaacaggaacggagagagcgaaaagaagtgcggaaagaaaagaaagtgccggcttctcagcactggttcggaatattgccgtatagttttaagctgtggatgaagcggaaaaaataaagtgaatcacacgaaaggccctcctgatacaggagggccttattggtattcctcaatgacggcaattttatttaccttttggctgtagggattaaaagaaatcgtaacaaacacgccaaattcttttgcgccatcccgcaatgtcaagtggtattgcttgactgcttcgtccgttcttttccgatcccacaccttttgaataaataacgtttgggcgagcggatatctttttttagcttccttttctgctaacttttcccattttgatttatggtgaacagcataataaggcaccgtttccgcctgagctgttcctgaaaccccgaaaacaagaagagaaaggcaaatcagactttgtttgatcatcattcttcgtcctttcgctgtatatactttccattttgttctaggcacctcgttattttctcacgttttattagaaaaaattccaaaaaggtgtgtaatttgaagcaaaacgctgtttttaaaagataccattctcaaaaacgaacaatttgaccgattttgacatttttcaagacgataatccttgattatactttgttcatacagttctttaaagagaacggttgtcatatttattaacagttttacagggggtaaggcatgttccgattgttgcgaatggaaaaaaagggcaaggtgagatggcggatgatgctatttttacggctttcgttcattttttgcctgtccgtgacgatatgtgctcagttcacaggtgatacaagttcctccttcaatgatgtgaaaagcttcagtctccaggttcaaacgtgcggagattttcaatatacggatgacgattgccgttatgacgaacgctgggatcaaagtgatttacatataacaaatcaaactgatacgtcaggcaccgtgtgtgcgccgcttcagctctatgccgagctggagaataagggaaaagagcggactgtttctgactggaaatgggagctccataaaatcgcttctcagcagcagcctttacgaaacggcaatgttgtggataaagggcttattactgataaaaaaagcaaaacgatttataaaattgagtcaaagcggtctttgcagccgggcatatacgcattcaaggtttacaagcctgaagggtatccggcggacgaagaaaaatttgagtggtcaaaaccgatgaaactcgtcaaatgccgggaacaggcgaccgtttccgatctaaagaaaacggagaaagagccggctgagccggtaaaagaaagcggggaagaacatgaaaaaaacgctgaaactgatcagtaatattttgtatgccgtcatcttcagcttgattattgtgctgacgttaacggtgatttcgacccgggcttccgggggtgaaccggccatcttcggctatacgctgaaatccgtgctgtcgggttcaatggacccggaatttaagacgggttcgctcatagcggtaaagaaaatttctgacgtgaatgacttaaaaaaaggggatgtgatcacctttacgcaagatgacggaacagccgtcacacacagaataatcgggatcacaaaaaaggacgggaacctgctgtttgagacaaaaggggaccataatgccgccccggatgccgcacccgttcaagctgaaaaagtggcggcccagtatacgggatatcagcttccgtatgccggatatgtcatccatttggccagccagccgatcggaacggcgattctgttaatcgttcccggcgtcatgcttttgatttactcaataacagtcatcgtcagcgccctccgcgatattgagcggaaaacgaaagcgctggaagaacatgcgaaaaagggaaccatctctacatgaatacggttgcaacctggcgacaggatttgataacaaaaataaaaagtaaggggagagtacagacatgggtatgaaaaagaaattaagcttgggcgttgcctcagccgcactcggtttagcattagtaggaggaggcacatgggccgcatttaatgatgtgaaatcgacagacgctacatttgcgtcaggaacacttgatttatcggctaaagaacaatcagccaatgtcaatttgtcaaacttaaaaccaggtgataaattgacgaaagattttgaattcagaaacaacggttcacttgccattaaagaagtgctgatggctttgaattttactgactttaaaggagcaaagaaaggaaatgaatctgcggaggatttcctcagtcagtttgaaattacggttctgacagtcggtaaagaagggggcaacggctatcctaaaaatatcattttgaaggcggccagcctgaaagacttatacttaatgtcaacaaaacaggataaagcagctgccgaagcgatcagcaagcacattgatccgaaattcctgagtgagagcggaaaagtcaatgtagcaaccattaacggcaaaacagctcctgagtacgacggagttccgaaaacgcctgctgattatgaccaggtgagaatggaaatccaatttaaaaatgacaccgcaaaaactgcggacggattaagtgtgcaaaacaagttccaaggcaatgcgatttctcttcaattctcttttgaagcaacgcaatggaacggcttgaccattacgaaagatcatacggataaagacggttacgtcaaggaaaatgaaaaggctcacagtgaggataaaaactaatccgaaagtcggacagttaaaagaggagttgtgcacatatggcggcactactcctctttttgcgcttttctccatttttgataatctaaaaattcacgaaattgtttttttgataccccggatgtcatcgcatcgcgaactaatttctcccattcactatctaattgaccatcgtattcggtttcatgtttttcatcaagtaaagtatgaaccgagacgtccagaacagcggagactttttcgagaaattgaatggaggggttcgtctgtaaatttcgttctattgagcttaaataagacttcgctaccccagctttttcagctagttctgatagtgagtagcctttttcttttcggtattgtttaatacgctggccaatcaatgtcatcaccttccttgtgatattatagcacattcagaaaggatttacggtatgacttctggctgcctggatatgttgagaagactttttatgcgaaagcaggtatttgcgtatttcttctaggctgatatttgctttttgggcttctaatatcagctcaacccattccttatctaattgcgaaaattccatttttgcatttttcatgcattttctcctcctaaaatacttgtttatgtatttcagccaatccgcccatgaccttatctttacatgtctggaagtgattcatcgcatgcgaaacgccagaaattttttctatatacttttattataatatagaatttccagaaaaaacgggaaaggtgtcgaatggataacgcttatccagaaaaattactttgcaggaaaaataaaccgccgttttcaatctgaatgtgaattttcggctgatataaggctttcagcgcttgtttttccaaatggtattcctcaggtttttcctctgtctgctcataaaactgatcgagcagcccgaggtcctttttccatctggcgatcgcgctgtcagcccaggctgacggctctttggcggcagcgtcttttaagtaatgctccattcttttaattccgctttccggcttaatcatcggcgatatggtaaagcaatagtctgatatttgcgaggtcagcggaagcggtgcaagcttctgctgaaacccttctataattgttccagaaacaagatgcaggcctaaagacaaaagtctgtcttttttcatgtcggattggtatgaaatcactacatttaatccaagccagggctgaagcggcactctggctccggctgatacaattttctcatatattcttgtaaatctcccattttgtttaactgcttgaaagatttgaaagaggcgcggggctccaaagtaaataaattcgccgtccatatcctccggagccgtttctttatcagtgatgaacgtgatcttcatcgggttcggttcgccgcccgttttttcacgccaatgccaataaaacgggcggttcataatttgtttgtccatctcgaccgtcaactgaaccgtcataaaacccggcccgtgttctgtaatcggacagtggttcgcttcaaaaaagcgcagtaaaaattcgtgaacctcctgctgtctcatgtcgcgcttcctccttttagattaagatcctttttttctggcgggcttttccgtatcgtacgacagaaaagaggtgagattgtccattttgattctcatttcttcctctgtcagcgaatggcataaaatatcatgcaaatggtcttcaaaattgctcactttgatttttgttaaaatgtcatctaattctccgacgacattttcaaataaatgaattttgtcatacagaagttttaaaatatgctcttccaccgtatgttttgtcgccatattgtagatatggacatctctttcctgaccgagtctgtgaatccttccgattctttgttcgagccgcatcgggttccacgggaggtcataattgataatatggttgcagaattgcaggttgatcccttcgcctccggcttctgtagcgatcagcacctgcactttgccgcggaagagatccttcatccagtctttttttccgcgcttaaatccgcctctgaacggaacggagcttatgccgttctgctgaaggaaccattgcaggtaaatctgtgtcgccctgtattcagtaaaaataatgactttatcattaatcttttggatcaagtcaacaacttgaatcgcttttgagttttgcgtgacttgattgatgcggtccattaaattagcgatcgtctgatcatcgaatgcgggcgcttgtttgtctttttggtcaagcatttttttgagcgtcatatacacggcttccctgcttgaacagcattctctttgcagcgtcataatggaaaatgcgcttgcgggcttttccgtgccgtttttcagtgcggcgatgtcatcgtaaagcgcctgttccgtcggtgaaaaggtgatcggtactgtttccacgtggcgcttcgtccatgtaaggccggtgtcgctccgcgtgttgcggatcatcactttattgacgagctctttcaaatgctcatgagcgtcaatcccgtccttctgattgaaggtttcttgaaatccgctttcgtttcctaaatggccgggctttaacagtgacactaaattgaagatttcttcgatccggttttgaatcggcgttgccgtcaaaagcaggcagtatttcttcacaagacttctcgcaaattcataatttttcgttttgctgtttttgagcttgtgcgcctcgtcaataatgacgagatcataaggaatagaaagcacaatgtctttgtgaggcgagcgtttggccgtatcaatagaagaaacgacgatatcgcactgttcccacacatagcttttcttctgttcaacagcgggtattaaaaacttctcctgaagctctttcacccactgggaaacgagtgatgccggcacaagaatcaggatttttttggccagcccgcgaatcatatattcttttaaaatcaggcccgcttccaccgtttttccgagccccacttcatcagccaaaatcgccttgccgttcattttttcaacgactttctgcgcgacctcaagctgatggggaagcggagtgaaatcgggcaggtataaaggagccctcaacccttcaaattcaggaatggcaagggtctgctggacttcagccgacagtttgtacatctcccaatttgaccagggaccgtccgttttcagccgctcagaaaactctcccggccagtttgcatcaaatatgatctctgctgtcatatgtaacaaaaccgcctttcttttaaaaaactgatttatcataatttttgttgccggacgtaaatgagggtggtaggatataagtaatgatttcactaaaagatattgctttagtatgtccataaaattggtaaatatgagcgaatgacagcaaggggagagactcggacgaaagatgggcgtccgggcgccgaaggagcaaactgcggagtgaatctctcaggcaaaagaactcttgctcgacgcaactctggagagtgtctgcacttagaagaagcaggccaccaaaggggacgtctttatgatatgttcataaagtaaactttcaggtgccgggacagagaaaccttcattttcatgaggtgtttctctgtccttttttatatgtttttacaatgcgccaatgactgaagggggaagatgatgctgaaacgaacaccgctttatgacgtgtataaagaatacggcggaaaaacgattgattttggaggatgggagctgccggttcaattttcttctattaaagaggagcatgaagccgtccgcacaaaagcgggcctgtttgatgtgtcccatatgggagaagttgaagtatccggtaaagacgccctgtcttttctgcaaaaaatgatgacaaatgacgttgccgatttaaagccgggaaacgcgctttataccgccatgtgttatcctgacggcggtacggtcgatgacttgctgatctatcagaaaagcgagagctgctatctgctcgtgattaacgcgtctaatattgaaaaagacatcgcctggctgacggaacatgcggaaggcgatgtcacgctgacgaatcagtctgacgggatttcactgcttgctgttcaggggccgaatgctcagtcggttcttacgaagctgactgaatgtgatttgtcctccttaaagccgtttacatttattgatgaggcggacgttgccggacgacaagtcctgctttcaagaacaggctataccggtgaagacggatttgagttatattgccgcaatgaagatgcggttcatctatttaaggagatacttgcagcgggagagcatgaaggcctcgttccgtgcggcctcggcgcccgtgatacgctgagatttgaagcgaagcttgctttatacggtcaggaattgacgaaagatattacaccgattgaagccggaatcggatttgccgtgaaacacaagaaagattccgattttttcgggaagtctgtattgcgcgaacagaaagaaaaaggagccccgcgaaagctggtcggacttgagatgattgaaaaagggattccgagacacggatacgccgtgaaaaaagacggtgttccgatcggtgaagtcacgacaggcacgcaatctccgactttaaagaaaaatatcggccttgccttaatcaaaacggaattcagtgaagtcggaacggaagtagaagtggaaatccgtaaaaaaacggtaaaagcgaagattgtccgcacaccgttttataaacgtccaaaacagagctgaaaaaggagagtcatatgaagcatcgatatttgcccgcgacagaacaggataaaaaagaaatgctgaaagccatcggcgcagaaacaattgatgaactgtttgccgatattccggaaaatgtacggtttcaaaaagactaccaaattaaaaaagcaaaatcagaaacagagctgacgagagagctgacgaagcttgcggcgaaaaataaagacgctgttacatatgcatcttttctgggcgcaggagtgtacgatcactaccagccggttatcgtcgatcatgtgatatcccgatcagagttttacacggcatatacgccttaccagcctgaaatctcacaaggagagctgcaggcgatttttgaatttcaaacgatgatctgtgaattaacgggaatggatatcgcaaactcctctatgtacgacgggggaacggcgctggcggaagcggcgatgcttgcgtcgggacatacgaaaaagaaaaaaatcgtcatttccgcagccgttcatccggaatcgcgggatgttttgaaaacatacgcaaagggccaatatattgaggttgtagaggtgcccgtgaaaaacggcgtcacagatcttgaagcattggaacatgccgtttgtgatgaaacggccgccgtgatcgtccagtatccgaacttcttcggacaaatcgagccgttaaaggacattgagccgctcgcacataaaggaaacagccagctgattgtttcttcaaacccgctcgcgctcggtattttgacaccgcccggggcatacggagctgatatcgtcgtcggggacgcgcagcctttcggcatacctgcggcgttcggcggcccgcactgcggctattttgcagtaacgaaaaaactgatgagaaaggtgccgggccggcttgtcggccaaacggaggatgaaaacgggcgaagaggttttgttctcactcttcaggcgcgcgagcagcatatcagaagagacaaagccacgtctaacatttgttcaaatcaggcgctgaatgctttagcggcttcagccgcgatgacggcgctcggaaaaaacggcgtcaaagacatggcccgccaaaatatattgaaagctgattacgcgagacgccaagcggaaaaagccggcttgcacgtagcatttgacggcccgatatttaatgaatttgccgtcaggctgaatcttcccgtcaaggaagcaaaccggcggctcctgcaagacggcataatcggcggatatgacttaggccttgcgtatccggaactgaatcagcatatgctcattgccgtcacagagctgagaacaaaagaagagatcgattcgcttattgcgggattgggggatcaacatgaataatcaagatcaggcgcttatttttgaaatgtcccgcgaagggcgtatcggttacagccttccggagcttgatgtgccggaaacagagcttgaaagccttcttcccggtgactatatccgcgatgaagacgcaaagctgccggaagtatcagagctcgatattatgcggcattataccgctctttctaagaggaaccacggagttgattcaggcttttatccgctcggctcctgtacgatgaaatacaatccgaaattaaatgaaaaaattgcccggatcgcaggtttttccgccattcatccgcttcaggacgagggcacggttcagggggcgcttgagcttttatacgatttaagcgggcacttggaggagattacgggcatggacgaggtgacgctgcagcctgcggcgggcgctcacggcgaatggaccggcctgatgatgatccgcgcctatcacgaagcgcggggagacttcggacggacgaaggtgattgtccctgattcagcccacggtacgaatccggcatccgccacggtcgccggttttgaaacgattaccgtcaagtcaaatgagcacgggctggttgacattgaagatttgaaaagagcggtaaacgaagaaacagcggcgctgatgctgacgaatccgaacaccctcgggttatttgaggaaaacattacggaaatggctgaaatcgtccatcaggccggcggaaagctttattatgacggagcgaatttaaatgccgttttaagtaaagcaagaccgggagatatgggatttgacgtcgttcaccttaatctgcataaaacatttaccgggccgcacggcgggggaggaccgggctcaggtccggtcggagtgaaaaaagaattcattccgtatctgccgaaacccgttctcacgaaaaaagagggccgtttgacttttgactatgatcggccgcagtcgatcgggcgcgtaaaaccttattacggcaacttcggcattaatgtcagagcctacacgtatatccgttccatggggcctgacggcttaaaagctgtgaccgaaaacgcggttttaaatgcaaattatatgatgagaagactcgcgccttattatgacctcccgtatgaccgtcattgcaagcatgaatttgtgttatcgggaagaaggcagaaaaagctcggcgttcgaacgcttgatattgccaaacggcttttggatttcggctatcatccgccgactgtgtattttcctctcaatgttgaagaaagcatcatgatcgaaccgacggaaacggaatcaaaggaaacgctagatgcgtttatagatgccatgattcaaattgcgcgggaagcggaggaatcgcctgaaatcgttcaggaagcgccgcatacaacagttgtcaaaagaatggatgaaaccaaggcggcaagaaagcccgttttaaaatacgaacgtacacttgacggcagccgctgacacggtgtaaaaaaaagagctgtccgttttatacggaagctctttttttatgattagttttttgctttaatttttccgccccattttttaaatccgcctttcaggttgtaaatatctttacagccgtgtttgcggagcgtctgtgccgcgcgtccgctgcggacattgttttggcagtacagataaacgggtttatcaggacggatttcacttttgcgctgtttcagctgtgacagcggaatgttgcgcgcgccgagaatatggccgccttcaaattcattcggttcacggacgtcaatcagctgcgcttttctgtagcccgcgcggaattcctcttccgtaagtgttttcattaaacgctgctggtaaaaatacgacacgatcatataaacgataaacgccgcaacaataattaaagcaatcatattagacaatgcgattctactcctttaacttataaaatcaaaaccctgcttcctgaaaacaaggcttaccggacgttttgggacaaatactattatagtaaagcatgaagcgattgtcatccttaatgaaacgaaatatttttcattttcaaggcagtttgttaaactgattttattaaaacgataaagaagggttcagtgtatggaaaaagaaacatggcggtttattgactcagggaatgaaagcccggcatttaacatggcgctggatgaagcgcttttatattggcacagccaaaaaaaaattcctccggtgatccgtttttacggctggaatccggcaactttgtctgtcgggtattttcaaaatattaagaaggaaattaactttgacgcagtacataaacacggcctcgggtttgtcagaagaccgacaggcggacggggtgttctgcatgataaagaattgacatacagcgtaatcgtttcagaggatcacccggaaatgccggccacggtgacagaggcgtaccgggtgatttcagaaggtattctgcagggattcagaaaccttggacttgatgcctactttgcgattccgcgaacggagaaagaaaaagaaagcttgaaaaatccgcgctcgtccgtctgctttgatgcgccttcgtggtatgaactggtcgtcgaaggacggaaagttgccggaagcgcacagacacgccaaaaaggcgtcattcttcagcacggttccatcctgcttgacattgatgaggataagctgtttgatctgtttttatatccgagcgacagagtccgtgagcgcatgcagcggaatttcaaaaacaaagcggtagccatcaacgccttagcgccgaaacgggtaacgatggatgaggccagaatcgcttttaaagccggttttgaggaagggctgaacattcatcttgagccttacacactcacgtctgaagagcttgcatttgtcaatgagctggctgagacgaaatacgcgtctgatgaatggaattataagcgctgataaggcttgacagaccggaagcatccttgttttttcatgaccgttagtgtaaacttgtaatggtttataaagttaaggtgctttttgggagggttacttatgacaacaccaagtatggaagattatattgaacagatttatatgctgatagaagaaaaaggatatgcacgggtttctgatatcgcggaagctttggcagtccacccctcctctgtaacgaaaatggttcaaaaactagataaagacgagtatttgatttatgaaaaatatcgcgggctcgtattgacgtcaaaaggcaaaaagatcggcaaacggctcgtatacagacacgaattgcttgagcagtttttaagaatcattggtgttgatgaagagaagatttacaatgatgttgaaggaatcgaacatcatcttagctggaacagcattgaccgcatcggcgacctcgttcagtatttcgaagatgacgaaagccggaaaaaagaattgaaatccgtacagaaaaaaaccgaaaatcccggtgaataaagggcagcccgaaatggggcgccctttttttaatgtcttcattctttggtctatttcgcccagccgtttcttaaaataataatacaccttgagatggaagggagagggcgcgctatgcagattgacggcgtattttcgggcggggggataaaaggggtggcgcttgccggcgcttatgaagcgctggaagaaaagggctttcgctttgaaaggctcgccggaacaagcgccggcgcaattattgccgcatttatcgctgcgggctatacgagcagagaggttcattccatcatagatgaggtggacggaaggcaattgcttgatcagagatactcattcctcccgctgaaaatcctgcggtgggtgtcgatatattggcgcctcggactatacagaggcgatatgctggaaaaatggattgcggataaattaaaagcgaagggcatcattgcgttcggcgatttgaaaaaaggctcgctccgtctcatcgcttcagatctgacgaacggaacgatgatcgtgcttcctgacgatcttccccgctacggattaaatccggagatgttcccggttgccagagccgtcagaatgagctgcagcattccttatttttttgaaccgataaaactgaagaccgaaaaaggcacctcaacggtcgttgacggcggcgtgttaagcaatttcccgatttggctgtattcaaaagaacgcaaacggccggtcatcggaatttcgctttcgcccaacgaaaaagagcgcccgaaaaaatcaatccgcaacgcttttgagctgttcggggctttgtttgaaacgatgaaagacgctcatgatgccaggcatatcgcgacaaagtacgaacagaatattatttttattccggtggaacatgtgatggcgacggagtttcatctcacaccgcaaaaaaaactagctctcattgagctaggaaaaagcagaacagagcaatttttgaagcaatggagctattaaaaaagcgctctgtttttctttttattctttttgccttctatgacggtaagctgggtctggctttttttcttaagaatcatcggcttcggtctgctgctgctcggcacgctccgcaaatggctgacccggcctctgtgtccggcgcggtgcttcgctttttgctccttcattcggagccgcgattgtctggccgcttttctgaaagcggttccgtcacggccggtgcggcggttcaggaccgtcctcacgataaaataaataatgatgcctgcgataataacggtgatcgctcttgaaatcatctgcccggggttggttaccgctgcataaatgaaaccgaatgcgccaagcgctatcaatacagcaaaaaaaggttgtacacgatgattcataactgcccacctccaaaataataacggtaactgttcagattacgttgtgagacggcttttcgctctgttctgaaatgtcttccagtctgagaagctcgttaaagctttctatggcaacctcgacctggtcatccgccggttcctttgtcgttaaaagctgcagccacaggccgggataaccgagcactttcaaaacggggatattccgcactctgttcgtcagctggagcacttcaaaggagatgccgagaacgaccggtataagcgcaatcctgtctaagatccgcacccaaagcggatctgtcggaacgagtaaatagatgaacatgccgacaatgatcgtaaataaaataaagcttgaaccgcaacggtaatgaagccgtgactgcttctgaacattttctattgtaattggcaaattctgttcataacagtttatgaccttatgttcggctccatgatattgaaacactcttttaattaacggcgtcattgataaaaaataaatgtagccgagaagcagaataagcttaaacagactttcgattccgatctgcgcggcgtctgaggaaaagacgggccttacaagctccgctaagaagaccgggacgagcgtaaaaacgaatttgctgaacaaaaacgacagaacgccgatcaccgccaggctgaaaaacatcgataagcccgaacccttcttatcttcctgctccagcttggcgtcatcttgaggatcaagcccgtaacgttcgctggaaaagtttaaatgctttgtgccgttggcgctcgcctcaatgatggcgacgattccccgcaaaaaaggaatcttttttaaagccgaaagcttggcgttcggcactctcggaagcttgaaaaaatcaatgcttccgtcattcctgcggatggcggtaacataattttttctgccgccgaacatgaccccttcaacgacagcctgcccgccgtaagcagggggcgttttttgtttggacattgtttatcaacctgcctgtttttttaggatttactaaccatttcctttcactctattgtacaggaaaccgcggtaaacctctagttagacagccggaaaatcaatgctttttctacatgcagtataccccgtttctttagattttactcattgaatgaaaatatggcgcagttttttatgacttttcaattttggggcagtctatgactggaggtgccatgatgacaagcgaaaaacattcagaacaggaagaaaaaaagaagcaggatgatgatcagcagcctgtttcatttaccggcagaatttgcggtatcggatttgccggcggtgtattttggagtttgatcggctatctcgggtatgtctttcatttttcagagatcagccccaacatgattcttcagccgtttatgattggagaatggaaaaaacaatggctcggcacgatggtcagcatcgttgtcatcggattcatttcaattgccggggcgtttatttatttcgtctgcctgaaacgttttaaaaccatgtggccggggatggtgtacggcgtcattttatggtgtgcggtttttttcttattcaatccgattttcgaagatgtgaaatccgtcactgaattgaaatcagatacaatcgtgacgacgctttgcctttacattctgtacggtttgtttgtcggttactcaatttccttcaactacaatgaacttacgtcagacaagcttgcaagggcgctcggcaacaagtgaataagtgtataatccctgtccggtatggtaaaatgttcacgagaagtgaacattttttatgctgaaaaccgggcggggatgctcccgcgttgtcaggcggcagtcaagaatcggcgaggaggagaaagggaatgaaacttgagaaattgcgaaatcttttcggtcagctggatatagacggaatgttggtgacaagctccgccaatctgcagtatatgacgggatttacgggttcgtcaggccttgcggtcatatcgaaagaacgtgcggcatttatcacggatttccgttacaccgagcaggcgaagacgcaagtgaagggttttgacattatcgagcacggcggaagcttaatccaaacggctgcggatacgattcttgagtacggcattaaaaaactcggcttcgagcaaaacagcatgacgtacggaacatatgcatcctaccaagcggtgctgcaggaagcggagatggttcccgtcgcggattccgttgaaaagttgcgcttgattaagtcaagtgaagagattaagatattagaggaagctgcgaagattgcggatgatgcgtttgaacatattctgacgtttatcaaaccgggcatctcagagatttcagttgcaaacgagcttgaattttatatgagacgtcaaggagcagacggctcttcctttgatatgattgtcgcctcgggagtcagatccagccttccccacggagtggcaagcggcaaattgattgaaaagggagacttggtcacgctcgatttcggcgcttattataaaggctattgttctgacatcacacgcaccgtcgcggtcggagagccaagtgataaactgaaagagatttatcaggtcgtatacgatgcccaagcgcttggtgtcctgcatattaaacccggcatgacgggaaaagaagcggacgccctgacgagggatcacatcaccgcaaaaggctacggacagtatttcggccattcgacaggacacgggtttggaatggaagtccatgaatcaccggggctgtctctcaggtcatcggccgttcttgagccgggcatggcggtaacggttgagccgggcatatacataccggaagttgggggcgcaagaatcgaagatgatatcatcatcactgacgacggcaaccggacaattacgcattcccctaaagaattaattattttgtgatcggaatataggaggacatcaaacatgatttcagttaacgattttcgtacaggactaacgattgaagtagacggcggcatttggcgcgtcgttgacttccagcacgtaaagccgggaaaaggagcggcatttgtccgttctaaattgcgtaacctgcgcacgggcgctattcaggagaaaacattccgtgcaggtgaaaaagtcgcgaaagctcaaatcgaaacaaaaacgatgcagtatctttatgccaacggcgatcagcacgtgttcatggatacaagctcatatgaacagcttgaattgaacgaaaaccaaatcgaagaagaattgaaatatcttctggaaaatatgtctgtgcacatcatgatgtatcagtctgaaacgctcggtattgaactgccgaacacagttgaactgaaagttgttgaaacagagccgggaattaaaggcgacacggcgtcaggcggcacgaaacctgccaaaacggaaacaggtcttgtcgtaaacgtaccgtttttcgtgaacgaaggcgatacgctggttgtaaatacatcagacggctcttacgtgtcaagagcgtagtcaaagaaattcggagtctgctccttttacggggcaggctttttttgcgttctgcctgaatctttcttctatatgaaaatagtgagactacttccgtcagctagagcatatagtgtaacaaaatgcttgaagttgggggattgcaatgaaatttttgtttggttcaatcaattctactgttttaacgatggccggtttacgagttttgtcctcgctcattgaattatcggccgctattatcatgcttttgacaaacgacatcagaaaggcggttgtggtgaatagtattttggcaatcgtcggcccgctgatctttatcatcacaatgacgatcggcatttatcagattgccggacagctctcatatgcaaaattaatattgatttttgcgggagtggtgctgattttggccggtgtgcataaatagagggccggggtgtcataaagtctgtcccggatcatacattttaaagaagccaatcggtaaaaaaggaggagactctattgaatgagattacagaggttctccctgaattattgagagatgccatctccgccgtgcccgaagaagcgaggcgggatacagaagaaatcagaatccgcgtcgacaggccggttgaactgatccaaaaaggacaacctttgtatttgtcatatgtctgtacggccggcgacgcacagctgatcctcagccggctcagcaattacagtatgtacacgctggaagaagagctgaaaaaaggatatatcacaatcagaggaggccaccgcgtggggctggccggaagagtcatcgtcgaaaacggagccgtcaaaggactccgggatattacttcttttaatatccgaatcgcccgggagaagctgggaatcgcagaaccgctcattcctttcttatggaaagaaaactggctgaatacgctgatcatcggtcctccgcaaacggggaaaacgactttgcttcgtgatttggcccggctttccagcaccggatcaaaacgcattcccgcaaaaaagacaggtatcgtagatgaacgttcggaaattgccggctgcctgcggggcattccccagcacagtttcggccgcagaatcgatgtccttgatgcctgtccgaaggcggaagggctgatgatgatgattcgctctatgagtcctgatgtcataattgtggatgaaatcgggagaatggaagactcacaagcgctgctggaggcgctccatgcgggcgtatccgtcatcgtatctgcgcacgggtggaatatgaaagacttggtcaagaggccgtcgctgaaaatgctttgggaggaaaacgtgtttgaccggtatgttgaactgtcaaggcgccgcggtccgggaacgatcagcaggatgtacggaaaggatggggaacctgttccacatgctgaaagcgtgatgacatgctgaagcttttgggtgccgtgtttattctgacagcgacgacttggaccggatttgagatcgccaaaatgtatatagaaaggccgaggcagatccgtcagctgcgcgcggcgctccaatcgcttgaagcggaaatcatgttcgggcatacaccgctgcataccgcctcgggacaaattgctgcacagctttccaaacctgtatcgttattgtttcaagctttcagcagaaggctagagcagggaagcgattccgccaaaacggcttgggaacagagcttgaaaaataactggtcgtccatggcgatgaaaaaaagcgaatatgatgtactaaagcaattcggagagacgctcgggctccatgaccgtgtttctcagcagaaacatatcaagcttgcgcttacacatttggaagcggcggaagcggatgccggacgggcgcaggcgaaaaatgaaaaaatggtgaaaagcttaggatttttagccggactgttactcattcttctattgatgtaaacatgaggggagcaaacataaaatgggagtcgacgtaaatgtcatttttcaaatcgccggagtcggtatcgtggttgcgtttctgcacaccatacttgaccaaatgggaaaaaaagaatacgcccaatgggtgacgctgcttggctttatctatattttatttatggtggcgacgattgtcgatgacctgttcaaaaagatcaaagctgtgtttctattccaaggataggggggcttacagattgagattgttcaaattgtaggtttaggcctgatcgccacatttctctccctgatcgtaaaagaacagaaaccgactttcgcgtttatgattgtcgtcttcagcggctgcgtgatctttctttatctcatcgaccagatttacgacattatcagaatgatagaaaaaatagccgtcaatgcaaatgtcaatatggtctatgtggaaaccattttaaaaattatcggcatcgcctacatcgctgaattcggagcgcagctgacaaaggatgctggccagggagcgattgcttcgaaaatagagctggccggaaaaattttgatactggtaatggccgtgccgatactcaccgtcattattgaaacgattctcggacttattccttcttgatcataaataaaatggaaaggggggcacaaaaaatgaagcgctttcggtgggcgggagcttttttgttcatcctcttattttttcagactgaatgtgtacaagctgccggaacagacggtgcatcgcaggaaaccgcagttcaccaagaatccgctgatgaagtggcgaaaaagcaggccgaagcgctgaaaacagaaggcatcggaaagttttgggacgacatcatgacagaatacggcggtcttctgcctgaaagccaaaagggaagcatcatcgactttattaacggagaaaaaacgttctcaccggaggcatggctgaaggctttattttcatacttgtttcatgaagtgctcgcaaacggaaagcttctgggaactttgattcttctcaccattttttgtgtcattctgcagctcctgcaaaatgcgttccagcagagcaccgtcagcaaagtggcttatgcaatcgtctacatggtgctgattattctcgctttaaacagctttcatgttgccgtcaattatgccagtgaagcgatccagacgatgacaagcttcattctcgcgctcatcccgcttttactcgcgcttttggcgtcttccgggggagccgtctccgcagctttttttcaccccgttattttatttctgatgaatacgagcggccttctcattcaaaacatcgtcatgccgcttatcttcctgtcagcgattttaagcatcgtcagcacgatgacggatcaatataaagtcacgcagcttgccaatctgctcagaaatatcgcgatcggcgcgcttgccgtatttctcaccgtgtttctcggcgtcatctccgtacagggggcttcggctgccgtgacggacgggattacgctcaggactgcaaaatttataacaggcaattttattcccgtactcggccggatgtttacggatgcgacggatacggtcatcagcgcctcgctcctattaaaaaacaccgtgggaatcctcggagtcggaattttgatctgcatctccgcgtttccggcgatcaaagtgctctcgctcgcttttatttataagctcgcggccgctattctgcagccgctcggaggcgggcccgtcattacgtgcctcggcgtcatcagcagaagcgtactgtatattttcgcggcgctcgccatcgtctctctcatgtttttcctcagcatcacagtcattattacagcaggcaacctcactatgatgatgaaataaaggaggcccattggatatgagctttttaacagaatggctgacaagcattattttatttatcttattcgccatcgtcatcgacatgctgctgcccagctccagtatgcaaaaatacgcaaagatggttgtcagcctgctgttaatcattgtcatgctcaacccgatattcaaacttttcaaaacagacccggaaatcatcttcgattatttgacaaaacaagagcaatctcaatccgctgatataaaaaatcaaattaaatcagaaaaaaaagaaatacaagcatcaaaccgcgcatatgttttagaagaaatggctgtccaactaaaaaagaaagcggaggagatgttcagtcatgacgaatacaaaatagacgacatccgccttacagcggaagaacaggttcgttcagaagaagatgtaaaaacgatcagcgtgtatatggccccatcttctgaaaaaaccgtgcaaaccgtcgcaccgatcgacatccgcacagaccgcaaatacgaaccggaaggcgcagccgacaaaaaagaggccgcagacatcaaagaaaaacttgcggatatatgggaaatcggcagtgagaaaattacggtttatatggaaggcggggagaaaaacggccatgaataaaaacggactatggaccatactcaaaaaacagctgatgatcggacaggcgaaagacggagaaaaaccaaaactgacaaaatatcattactttctgttcgtgtttgtgctcggggtatcttttatgctggtcagccagctgttctcttcaccggagaaaaccgggaaggaccaagcggtgcagaccgtcatgtccggccgaacggaagacaaaagcgggcaaaaaagcgcacccgtttttaaggcatcgaaagacggcagcgcaaaaaccacgatcgatgattacgaaagagactatgaaaaccagctgaaagaaatccttgaaacgattatcggcgtggaggatgtctcaattgtcgtaaacgtagacgcaacatctttgaaagtgtttgagaaaaataaaacgaaaaaagacaccaccactgaagaaaccgataaagaaggcggcaaaagaagcgtaaccgatcaaacctctgaagaacaaattgtcatgattcgaaacggggatcaggaaaccccggtcgtcgtccagacgaaaaagcccgatatccgcggtgtactcgttgtcgctcagggagtggacaacgttcaaataaaaaaaaccatcattgatgccgtcacaagggtgcttgatgttccgagctaccgtgtagcggttgcccctaaaaaaatcaaggaggattcataaatcatgctgaaaaaacaaacggtttggcttttaacaatgctcagtctcgtcgtggtattaagtgtttattatattatgtcgccggaaagcaaaaatgccgtgcagatgaaaagcgaaaaaagcagcggagaagtcgccactgaaaaaacgccggctcctgaaacgaaagataagagcggaagcggcacggaaaaagaagacggcacaaaaggaacgaaagattctaaaggcacaaaagaggataaagaaacatcagccgaagcatcggacaaagacggatcggtcgccacagaaacagctgatgaaaacttatttaccgcataccgcatggagcttgaagacgcgagaagcaaagaaagggaacagttaaacagcattgtttcaagcgatgatgcgaccgcaaaggaaaaaagcgaagcctacgataaaatgacggcgctgagcaatgctgaagggacggaaaaacagctggaaacgctgattaaaacacaaggctacaaagatgcgctcgtggatgctgaaggagacaaaatcaacattaccgtcatgtctgacaaacattcaaacgcaaaagcttccgctatcattgacctggtggaaaaagaaatcaagacgatgaaagacgtcgccgtcacgtttgaaccgacaaagtaagagacctgaaccgcccgcacccgctgcgggcttttctgatgtcattttagatcagtgttgaatttacacaagcgctcctgtaagataaacatagtatgtacttttagtagcaacccataaatttctattttttatacataggagtggaaactgatgttaaaaatcaacgaaattcatgaactgataaaaagaatcgatgaatcttccatcgacgaatttgtttacgaaattgaaggcgtaagcctcaaactgaaaaaaaatgaagcgccggcagtgaatgtaacgggacaagcccaagccgttcccgccgcttacgcacctgctccgcaggctgcaaaaccggaagcgagtgaagccgctcctgctcaggaagcgccgaaacaagacgaaaacctgcacaaaattacgtctccgatggtcggaacgttttatgcttcttcatcgccggaagccggcccttacgtaaaccaaggttcaaaagtgagcgaaaatacagttgtttgtatcgtagaagcaatgaaactctttaacgagattgaagccgaagtaaaaggagaaatcgttgaagtgttagttgaaaacggccagctggtcgaatacggacaacctctatttcttgtaaaagctgagtaaggagacctgctattatgattaaaaagctattgatcgccaaccgaggagaaatcgccgtcagaatcatccgggcctgcaaagagctgggcattgaaactgtagccgtttattctgaggcagataaagacgccctgcatgtccaaatggccgatgaggctttttgtatcgggccgaaaacatcaaaagaaagctatttaaatgtaacgaacatcgtcagcgtcgcaaagctgaccggcacggatgcgattcatccgggatacgggtttttagctgaaaacgccgactttgccgagctgtgcgaggaattaaacgtaacgtttgtcggccctacggcggacgccatttcaaaaatgggaacaaaagatatcgcgcgcgacacgatgcagctggcgggcgtgccgattgtgcccggttcaaaaggaatcataaaaaatacggaagaagcggtttcgcttgcaggtgaaattgggtatcctgtcattataaaagccactgcgggcggaggcggaaaaggcatccgggtcgcacgcacagaagaagaactgatcaaaggcattgagattacccagcaggaagccgctacggcattcggaaatccgggtgtgtacatcgagaagtacatagaagatttccgccatgttgaaattcaggtgcttgcggataattacggaaacacgatccatctcggagagcgtgactgttctatccaaagacgtctgcaaaaacttcttgaagagtcaccgtcacctgcgcttgattctgaaatcagggagcagatgggtgaagcagcggtaaaagcagcgaaggccgtcggttacacgggagccggcacagtagaattcatctatgactacagagaacagcgctactacttcatggaaatgaacacgcgtattcaagtagagcaccctgttacagaaatggtgacgggaacggatctgatcaaagaacagatcaaagtggcatccggacaggagctttcgctcagacaggaagacgttgaatttaacggctgggcgattgaatgccgcatcaacgctgaaaatcctgcgaaaaacttcatgccttcacccggtaaaattaacatgtacctgccgccgggcggactcggtgtacgcgtggattcagccgcatatcccggctactcgatcccgccgtactatgacagtatgattgctaaagtcatcacatacggaacaacgcgtgatgaggcagtcgcacggatgaaacgcgcgctgagcgaattcgtgattgaaggtattgagacgacgatcccgttccatttgaaactgcttgaacacgaaacatttgtcagcggagagtttaatacaaagtttttagaaacatatgatgtaatgggctcataatttttgcgggaggtgaattgaatggaagacaacagtgtgcttaaaatggatcatgatgaggctcatttaggcaaggttgaaattgctcctgaggtcattgaagtcattgccggcatcgccgcttccgaagttgaaggagttgctgaaatgcgcggcaatttcgccacgggcgtcgtagaacgcttcggcaaaatcaatcacggcaaaggcgtaaaggtcgatttagccgatgacgggattaccatcgacgtctattgcgtcgttcaattcgggatctcgatcccgaaagtggcggcaagcgttcaggagaatatccgccaaaccttattaaacatgacgtctctgaccattaatgaaatcaatattcatatcgtcggcattcaatttgacacgaaagcccaagaagtcgaaatcgacgaagaaatgtaatgagcgtataaaaaccaaggggatgggcagccctttggttttttatacgtttcccgtcatttcaggcatgaagaaagccggcttacaaacggcagccgagtttcttcatgctgtgaaatccgaatgaaattaatacggtttgtgaaaatattcggcattagggtgaaaaaacctaaatttcgacatgcgattgagaaaaaaatatgttatgatctctttaagcttaacgacaagcggataaagcggatctgaaggagaaagaaaatgaaaagaagaacagctagagaaaaagctttgcaggcactttttcagattgatgtcagcgatattgcaccgaacgatgccattgagcacgcgcttgatggtgaaaaaacagatgccttctttgaacagctggtgtacggagtgatcgaacatcaggttcagcttgatgaaatgatttccggccatctcgtcaattggaagcttgaccggattgcaaacgtagaccgcgcgatcctgcgtctggcggtgtatgaaatggtttattctgacgacattcctgctaacgtgtcattaaacgaagcaatcgagctggcaaaacggttcggcgacgataaagctgcaaaattcgtaaacggggttctttctaacattaaaactgatatcgaatcataggaggaaagaaaatgactgcaacaatcatcgacggaaaagaaacggctaaagaaaaacgcgaacaattggcaaaagaagtagaagagctgaaagcacaaggcgtagtgcctggattggcggtcattttaatcggagacgatcccgcttctgtttcatatgtgacaggcaagaaaaaagccgctgaaacaatgggaatgaaatttaagcttgaccgctttgactcaagcttaaccgaggcggagcttttaacagtgattgatcagtataatcaaaatcccgaattccacggcattctcgtccagctgccgctcccggatcatatttctgaaaaagccgtaatcgagcggatctcccctgataaggatgttgacggtttccaccctctcaacgtcgggaaaatgctgcttggcgaagatacatttcttccatgcacgccgcacggaattgtcgagttattgaaaaagacgaacgtagatctttccggcaaagaagttgttgtagtcggacgaagcaatattgtcggtaaaccggtcggccagctgctgctgaacgaaaacgcgaccgtcacatattgccattcccggacgaaaaatatgtctgagcatacgaaaaaagcagatattctcgtggtagcggtcggtaaagcgaacttcatcaaagccgatcaaatcaaagagggcgccattgtcattgatgtcggcgtcaaccgtctcgaaagcggaaaactttgcggagacgttcagtttgatgaagcgaaagaaaaagcatctttcattacgccggtgccgggcggagtaggtccgatgaccatcacaatgcttgcgcataatactgttaaatctgccagacgtacgttatcatagataaccggagacagtcacaaaaagtgtgacaatgagcacgatacccgcttcttaaggctcctttcagccagagcgggttttcttagtttagggcaaaaagcctttatgaaaggagtgcaggatgtgagtgaagcggcatatgtcacggtttccgcgctgaccaaatacattaaacgaaaattcgatgtggaccctcatcttgaagacatttggattaagggtgagctctccaatgttaaaattcatacgagaggccacatctattttacattaaaagatgagcatgcccgcatgcaggccgtcatgtttcagaggcaaagttcgaggcttgcgtttaagccagaagacggaatgaaggtcatcgtaagaggcggcatctccgtctatgaaccgagcggaagctatcagctgtacgcgaaagaaatgcagccggacggtgtgggggcgctctacttagcatatgaagaattaaagaaaaaacttgccggcgaagggttgtttgatgaccggcataagcaggccatccccgcttttccggccacgatcggggtcgtcacgtcaccgacgggagcagccgtcagagacgtcattaccacactcaaaagaagatacccccttgtgaaagtcattgtgcttcccgcgctcgttcaaggtgaaaatgccatcagatcgattgtgaagcgcattgaagaagccaatgcacaaaaaatgtgtgacgtcctgatcgtcggaaggggagggggctcgatcgaagaattgtgggcatttaacgaagaaatcgtggcccgggcgatttttgcttccgccattccgattatatcagcggtcggacatgaaacagattttacaatcagtgatttcgtcgcggatatccgggcggcaacgccgacaggagcggcagaaatcgccgtcccccacacgacggacttaatggaacggacaaaaacggcggaagtccgcctgacaagagcgatgcagcagcatatcagcaagaaaaaagaacggattcaatcgctacagtcatcctacgcgttccgttttccgaaacgattgtatacccaaaaagaacagcagtttgaccttttgtatcagcagttccaatcacagctcacagggcttacggacaggaaacaaagacagctggagcggaatacgtacagattaacggcgctccaccctgaaacccagctgaaacaggcgaaaaaacggtacgaggagcgctcaaatcagctcgcccgaagcatgaatgtccagctgaagcagcttcattcgcagtttcagacggttcttggtaaactgaatgcattaagtccccttcaggtgatggagagaggatacagtctggcctataaagacaaagagctgatcaaaagcgttgatcaagtggaacaaaatgatacgcttgaagtaaagatgacagacggcgttctgacgtgtgaagtattgcaaaagagaggcgaacgataatgacagaaaccaaaaaaagtgaagagctgacatttgaagaggcgatgaaaggccttgaaggcattgtggcaaagcttgaagaaggagacgtgccgctggagcaggcgattaattattttcaggaagggatggccctttcaaaaatgtgccatgaaaagcttcagcatgtcgaaaagcaaatggactttattttaaaagataacggcgaacttgcacctttcagcgttcaggaggaagacgaaggtgacaaataaactggacgcatttttagcatcgcgcaaacaactgattgaacagcagctttctttgtatacagaacggcttgcgatgccggaaaccctcaaaaaatctatgctgtattctttggaagcgggcggaaagaggctgcgccccctcgtcgtcttagccgttctgaatgcttacggaaaagatgaaaaagacgggattccggtcggatgcgctgtcgaaatgattcatacgtattctttaatccatgatgatctgccttgcatggacgatgatgatctgcgccggggaaagcccacaaaccataaagtcttcggagaagcggcagccgtattggccggagacgggcttctgacagaaagctttaaactgatcacatctcatgtgtctgaggcggtttcagcagaaaaacggctccgtctcgtcgatgagctgatcagcgcggcgggaacggaaggaatggtcggcggacaggctgccgacatggaagcggaacaaaagcggataacgcttgaggagctggaatccatccacgagcggaaaacggccaagctcctcggtttttccgtgacggcgggcgccattttggcagatgcgccggaggatgaagtcgaaaagctgcgtctgttcagcagccatatcggcatcggatttcaaatcagagacgacatccttgatattgaaggacatgaggagaggatcggcaaaccggtcggctcagatacgtcgaacgaaaaatcaacgtatccgtcgcttttaacgcttgaaggcgcgaaagaaaagcttgcgtatcatatcagcgaggcgaaacagatcatcagcggcctttctcttcagaaggaattgctgcatgacctctgtgatttaatcgcggcgagagatcattaaaaacggtcctgatttgaaggggctgccgctcctatggtaaaatgtaagcagtttcgatgaaaatacaaagggagtctttttcttttttcaaaaagacactgtttaatttgcagaaattcatgctgaaagtgagttgatccgctttggatcttttatcaatacaggacccgtcatttcttaagaagatgtcaattgaacagctggaagagctgagtgaggagatccgcaatttcctcatcacatcgctgtctgcatctggcggccatatcgggccgaacctcggggttgtcgagctgacaattgcgcttcacaaagaatttgacagtccgaaagataaatttttatgggatgtcggacatcagtcctatgttcataaactgttaactgggcgcggcaaggagtttgaaaccttgcgccaatataaagggctttgcggtttcccgaaacgcagcgaaagcgaacatgacgtatgggaaacaggccacagctcaacctcgctctcaggcgcgatgggaatggctgccgctcgtgatattaaaggatcgaaagaatatatcatcccgattatcggagacggcgctttaaccggaggaatggcgcttgaagcgctgaaccatatcggtgatgagaaaaaagacatgatcgtcatcctgaatgataatgagatgagcattgcgccgaatgtcggggcgattcattctatgcttggacggcttcgcacggccggcaaatatcaatgggtaaaagacgagcttgaatatttatttaagcgcatcccggccgtcggcggaaaattggccgccacagctgaacggataaaagacagtttgaaatatatgcttgtgtcaggcatgttttttgaagagctgggctttacgtatttaggcccggttgacggtcattcctaccacgaactgtttgaaaacctgcaatacgccaaaaaaacgaaaggccctgtccttttacatgtcattacgaaaaagggcaaaggctataaaccggctgagaccgacacaatcggcacatggcacggaacgggtccgtataaaatcaatacgggtgatttcgtcaagccgaaagccgcggcgccttcatggagcggacttgtcagcggcaccgtgcaggagctggcacgtgaggatgacagaattgtcgccattacaccggccatgccggtcggctccaaactggaagggtttgcgaaagaattccctgaacgcatgtttgatgtcggaatcgcagaacagcatgcggcgacgatggcggctggaatggcgcttcagggtatgaagccgtttcttgcgatctattcgacctttttgcagcgggcgtacgatcaggtcgtccatgacatctgccgtcaaaacgcgaatgtgtttatcggcattgaccgcgccggtttggtcggcgctgacggggagacgcatcaaggcgtctttgacatcgcctttttgcggcatataccaaacctcgttttaatgatgccgaaggatgaaaatgaaggccgccatatggtcaatacagcccttaattatgaggagggcccgatcgcgatgcgcttcccgcgcggaaacgggctcggcgtaaagatggataaagagctgaaaaccattccgatcggaacatgggaagtgctccgtcccggaaaagacgcggtcattttaacattcggtacgaccattgaaatggcgctggaagcggctgaagaactgcaaaaagaaggcctgtccgtgcgtgtcgtgaatgcgcggttcataaaaccgattgataaacaaatgatgaaggccattcttaatgaaggtctgccgattttaacgatagaagaagccgtgcttgaaggcggattcggcagcacgattcttgaatacgctcatgacctcggcatgtatcatacaccgattgacagaatgggcatcccagaccggtttattgaacacggcagcgtaaccgccctgcttgaagaaatcggtctcactaaggttgaggttatgaaccggatcaaactgctgatgccgccgaagacacataaaggaattggatcatgacagcaaaaaaagaacgattagatgtacttcttgtagaaaaaggccttgcggaaacgcgggaaaaagcgaaacgcgccattatggcgggcatcgtatactcaaatgaaaaccgattggacaaaccgggtgaaaaaatcgcccgggatcttccgttaacggtaaaaggaaaccctcttaaatacgtcagcagaggcggattaaagcttgaaaaagctctggaagtgtttcccgtctcggtaaaaggaaaaacgatgattgacatcggctcgtctacagggggattcacggattgcgccctccaaaacggagccgagcggtcctacgcagtggatgtcggctataatcagcttgcttggaagctcagacaggacgagagggtcgtcgtcatggaacggacgaatttccgctattccgagccttccgatttcacagagggtttgccggaatttgcgacaatcgatgtttctttcatctcactccgcctcattctgccggttttaaaaacgctgcttgtaccggggagcgattgtatcgcactggtgaagccgcaatttgaagccggacgggaatccgtcggaaaaaaaggcattgtcagagatcccggtgttcatactgacgttctccgccgcatgaatcaatttgccgcttctgaaggatatacagtgaaaggactgtccttctcaccgattacagggggagacggcaatattgagtttctgcttcatttggaatggggcggagaagacggaaacggcgctgaactgccggaagaagacattctccgtaccgtccgcgaagcacatgagacattaaaagccaaaaagacagatgtaccggaataatagggggctattattccttttttctgccatcatgtactttttatcaagaagcggttaacataatgacaagaacagcttgaaaacagaggtgcttacatgacaaaaggccaaaggcatataaaaatcagagagcttattacaagccatgagattgaaacgcaggatgacttagttgacatgctgagagaagaaggatataaggtaactcaggcgactgtctccagagacattaaagagctgcatctcgtaaaggtgccgacaaacaacggctcctacaaatacagcctgccggcggatcagcggttcaatccgctgtcaaaactgaagcgttcattaatggatgcgttcgtaaaaattgactcagcaagccatatgatcgtattaaaaacgatgccggggaatgctcaggcaatcggcgctctgatggataatctcgaatgggaagaaatcatgggcacgatttgcggagatgacacgatcttaatcatctgcaggacgcctgaagatacggagggcgttcaaagccgtcttttggagctgctgtagcgtaattatcagataaaaggtggaatgctgtttgttagctgaactatcaataaaaaactttgccattatagaggaactgacgatttcgtttgaacgggggctcaccgtcctgacgggagaaacaggggccggcaagtcaattattatagacgccgtttccctattagtcggcggccgcggctcgtctgaatttgtccgttacggtgaaacaaaggccgagcttgaaggactgtttcttttggacagcggtcatcccgtttttgaagtatgccgtgagcagggaatagacgcatctgacgacatgattgtcatgagaagggacattaatgccggaggaaaaagcgtctgccgtgtcaacggaaaattagtgacgattgcggctttaagggagatcggcagacttttattagatattcacggacagcatgataaccagctgttaatggaggacgataaacacttagagctgttggacaggtttgcgggcgctgaggccgaatccgcgcttcaggcttaccatgaaggctatgagcgttatatgaagctgctcaaaaaagtgaagaagctgtcagaaagcgagcaggaaatggcgcatcggctagacctgattcaatttcagcttgaagaaatcgagtcggcgaagcttgaattgaatgaagacgagcttcttcaggaagaacggaagcagatatccaattttgaaaaaatttatgaatcattgcaaaacgcctataatgcgctccgcagcgagcagggggggcttgactgggtcggaatggcctctgcccagcttgaagatatttcggatatcaatgaaccgctgcaaaagctgtcagaaagtgtgtcaagttcctattatctgctggaggatgcaacctttcagatgcgcaatctgttagatgatctggaatatgacccggaacggctgaattttattgaaacccgtttaaatgagatcaaacagctgaagcgcaaatacggagcgacggtagaagacattttggaatacggctctaaaatagaagaggaaatcgatcaaatcgagaaccgcgacagccaccttgaagcgctgaagaaggaattggagtcggtcggcaaagatgtggccgtagaagccgccaatttatcaaaaatcagaaaagcatgggctaagaaactggcggaagcgattcatcaggaattaaaaagtctgtatatgggcaaatcaacgtttgatacggaatttctcgtgaaaaccgatccgtcagccagtgaagcaccggttgttaacgggcagcccgtgcagcttacccaaaaggggattgaccttgtgaagtttttaatttcaacaaacaccggtgagcctttaaaaccgctgtcaaaggtcgcttccggaggcgagctttcaagggtgatgctggcgatgaagagtattttttcttcccagcaggatgtcacctccattatctttgacgaagtggacaccggtgtaagcgggcgggttgcccaagccatcgcggaaaaaatccataaagtatcgaccggttcacaggtgctctgcattacacacctgccgcaggttgccgctatggcggatacgcaccttctaatcgcaaaagaattcaaagacggccggacgacaacgcatgtcacgccgctttccaaacaggacaaggtagcggaaatcggccgcatgattgcgggcgtcgaagtgaccgatctgacaaaacggcatgcacaagagcttttaaaacaggccggacaggtaaaaacgacaggataagctgctgatacaggcagcttatttttttgttccatttctctaacagtgtatccaatgtttttcttcgtatgccggttataaatcaagcgcaggaaggcaaaagtatagatgtagcagaaaaagaaagtggtgtgggataggagcgaggagagtgaaggaatgaatgcacgataacatgaggaaagcaataggtgtaattctccttgtttctttactaagtgtaggcttttttaagccatttaaagaatatttactgataccgtcagaaatgagcgtctttgaaaaccagacacaggccgttccggtcaatgcatcaataagcgctgaaaagggcgaattatcagaagcctttacgctgaaagaagagcacggccatgcaaacataacagggcaaacacaaggccggtcagaagtagtatataatcttgccggatttcccattaaaaaaacgaaagtgcgtgtccttccagaattgaaggtcattccgggcggacagtccatcggtgtaaaactgcattcagtcggtgttttggtcgtcggttttcaccaagtgatgacaaaggatggaaaaaagtctccgggagaacaagcgggaattgaatctggcgacatcattattaaaatgaacggacataaaattgaaaaaatgagcgatatcgccccgtttattcaaaaagcgggcaaaaccggtgaatctttggatttattggtgaaacgcgataagcaaaaaatcaaaacaaagctgattccgacaaaggacgaagccgaggggaaatatcgaatcggcctttatatccgcgattcggcagccggcatcggcaccatgacattttttgaaccgaaaacaaaaaaatacggcgcattgggccacgtcatctctgatatggatacaaaaaaaccgattgttgtagaagacggagaaatcgtccgttcaactgtaacatcgattgaaaaaggaaaaggcggcaatcccggcgaaaaactggcaaggttttcgtcagaacggaaaacgatcggcgatattaaccgcaacagcccgttcggcatcttcgggacactgcatcagccgattaaaaacaacatttccgacaaagcgcttccgattgctttgtcaaatgaagtgaaaaaaggacctgcgcaaatgctgacggttatcgaaaacgataaagtagagaaatttgatattgaaatcgtcagcaccacgccgcaaaaattcccggcgacaaagggaatggtgttgaaagtgacagatccgaaactgctgaaaagaaccggcggaatcgttcaggggatgagcggaagcccgatcatccagaacggaaaggtcgtcggagccgtaacccacgtatttgtcaatgatccgacaagcggctacggcgttcatatcgaatggatgctgtctgaagcgggtgttgatgtttacgggaaagacaaagcaagctgactgccggatgatccggcagtttttttatgtgatgcgttcttcacttctttcctggattcatgtaaaataagacatgaagatttttcgacaaattcacgtttcctgatttgtcaaacttaatttttagtcgaaaaacctagaaaatgctagaaaaacaaagatataccactattattggtaaatatggattttttaaaaggggaagtagtggttttgtcgaatgtaacatgtagcagtcaaatgggttgcgtcctgttaatacattgggggaggaagaaacgtggagaaaattaaagtttgtgttgctgatgataatcgagagcttgtaagcctgttgagtgaatatatagagggacaggatgatatggaagtgatcggcgttgcttataacggacaggaatgtctttctttgtttaaagataagaatccagatgtgctcgttttagacattatcatgccgcatctggacggacttgcggttttggagcgtctgcgggaatcagagctcgagaagcagccgaacgtcatcatgctgacggcattcggtcaggaagacgttacgaaaaaagccgtcgatttaggcgcgtcctatttcatcctgaagccgtttgatatggaaaaccttgtcggccatatccgccaggtaagcggaaatgtcagcagtgtcacacaccgtgccccgtctgcgcaaagcagcattatccgcagccagcctgagccgaagcggaaaaatctcgatgccagcattacaagcattatccatgagatcggtgtgcctgcccatatcaaaggctatctttatttgcgtgaagccatttccatggtgtataacgatattgaactcctcggcagcatcacaaaagtcctttatcccgacatcgccaaaaaattcaacacgaccgcaagccgtgtagaacgggccatccgccacgccattgaagtcgcatggagcaggggaaatattgattccatttcttcactgttcggatatacggtaagcatgacaaaagcaaagccaaccaactcggaattcatcgcgatggttgctgacaagctgagattagagcataaagcttcgtaacgcaagcttttggctagatgtctttttcacgccttctattccgtgcatgaacgcggaagagaaggcgttttgaaattttgctggcgaaaacaatggaaatcactcacgccgttacttgttctatacataaatgcggtatctatgctgtctacacgtataataccggagctgatattttaatgattttgccgtctctgaaataaaagcgggggacgcggcggcttaacacagataagacttcgtagctgatcgtaccgagcatttcggcaatttcatcaacggaaatctcggcaccttgttgtttaccgtagatgacgacttcttctccttgtttgccctcattctcacctaaactgaccatgatcatatccattgtcactctccccgccaccggcacccgtctgccgcggtgaagaataaacccgcggttggacagggcgcgggagtaaccgtcaccatagccgatcggaatcgtcgcgatgatttcacccggttcggcgatatatgtggcgccataactgacggtccggggatctgtcaccatagctttcacataagcgatacgcgcctttaaacttagtgcgggtgtgagatccacgaggttcagttcctttatcgaggcggacggatataaaccatataacccaatgcctaaacggatcatgtcggcgctgaattccgggaatgcgatagcggcggctgtattgcacatatgcacggtaggcagcgtaatgtcttgattttttaaaaagcggagaaagctgataaacttttcgtgctgcagcatcgtcagctcagtgtccggttcatccgctgttgaaaaatgtgtaaagatgccatcccatgacagatatgtactcgacttgagcgctttcaccactgctaaaagatcttcttccgtacgcacacccagccggcccattcccgtatccacattgatatgaatggacagccgtttcgaatctgcttctttttccaatatccgattcgcttttttgatccagctgacttgaaacgctgataatgttatgttccaaacggcagattttttcacacagctgagagctgtgaagccgagcacaagaataggtgccgtaattcccgctctccgtaacacaattccctcttcgacgctggcgacagcgagctcgctcgccccgctttccaatgcctgccgcgctacttccacagagccgtggccataagcgttcgcttttacgacggccataattttagacgtattcggaatatggcggcggatcgcccgtacgttcttttttatcgcatcaaggtcaacttcaatccaaacttcccggcaaagttttttcatcacgattccttctttccttaatgagtttcagtactcatgctttcaatctgcattctattcaccttgaactgaaatcattcaaaacaagggaaggtgatcgctgatgtttaaaaatcaagtttttgggaaatcagtgtgtctgctttatttatgctgaaagggctgcatggcagcccttaaattgactttacaatattctgatctgaaaattgatgttcaaacattttggactggcttacagcattgttttgaatgacaatgccgatatttccccctccggcaccgaaaacagtttttgatgcagtcagcggactgatggatatggcgccgccaacattgacaactccgtttcctgatacgttgtttatcgtaatcgggcaaccgctcattctattttttctcctttctctcacagtctactaactatatgtacgctgtgatatggaataagattaaacaaaacggcaaaaagaatccggctgctgccagccggaaagggagggaaatacggatgtcatagtgttttcgttacattttgatcagagtattgagagcttgaagattgagatgtactggattgattcatttgcaggaccatccctgtatttcccccacctgagccgtagacggtttttgatacggttaaaggacttatcgaaaacgcaccgccgacattgacaaccccgtttccggaaagactgttaatcgtaataggaaaaccagccatcatatacggtctcctttctattaatctatttactatatgtacgctgtgtgttagaaataggagtaaacaaagcggtaaaaacttgtaaatcaaaaaaaactgccggacatccggcagtttttttagtctacttttcaaacggcacccagccgcctgtattctgaatcatttcccataacggttcaggaagtcggtatttctcaatttcagatgcttgaatggctttttcgatttcctgttcgcggccttctttgaccagcaccgcccattcggggttaatcaaaatgacacgtcccagagccaccagcggaattccgctttctaatacagcaagcgcttcgtccgcggtatagatggaaccgacggccatcagcggcactttatggccgacgcgttcgtttaataaatccatccgcgtccgtgaagaatccgccccgcggcgggctttggagttgacatccatcagtgaaatatgcagataatccaagttctcttccgcaagcgcgtcggcgagcatgaatgtttctttcattgtaagccccggtgtttccggctcttccggtgacaggcggtagccgagaacgaatggattttcagcgtgtgtatcaattgcctgtttgacagcgtcaacgactgcaagcgggaacgcaaggcgcttttcatcgcttccgccccagcggtctgtgcgccggtttgttttcggtgaataaaattggtgaatcaggtacccgtttgccccgtgaatttcaacaccgtcaaagccggcttcaatcgctctgcgtgtcgcttcgccgaatgctttcacgatgtgctcaatttcttgttcggtgagagcccgggacgtttgtctcccgtcttcttctgagccgctcggactgacgacgtcgttgtttggcacgagttcaggagggcattccaatcctccgtggtgaatctgcacaacggctttcgctccttgagactggatcgcctgagcgagttttttcaagccgggaatgtgagaatcatcatagatgccgggctggcctggaaacgctttgccgtccggcgttacgtttgcacatgccgtaatgaccatgcccatttcttttgaacggggagtaatgtagcttaattcacggtcggaaatcgttccgtcatcatttgatgaatagtgtgtcatcggtgcgactgaaatacggtttggtatggtgacgccgctttcgaacgtaaaaggttcaaacagcggtttataagtttgcttcatcatttcgccttcttccttaggagtttaactcgtccgtattctagcttatgttttaattgtgtgcaattattttgcttgttcttcttcctgaggttatgaccggctgaaccatttaaacgaatgaaacggttttctccgttccttttcaggatctttatatcctcctgaaatttgatggccgatcgagctgaatatgacagcggcggcgaagaggagaatgatttttttcatatacatatcttctttcttatcttttacaaggttatttataagcatacgcttgtgcgaaaaaaccgtcaatttgtttttatttattcttttttccactttcctgcggcgaatatcgttccgatctgaatcacaacacttaacagagcgcacactgccacaactgtgttgctgtccatagaagacaccctcctttttgttaggttgatgtatcatatgacagctgtctctgttttgacaaaaccgtaatgcggtgtttcatatttttcaacacaaaaagggcgcttttttaagcgcctttacttttttttcagccggttcaaagcgatttgaacggcgatggcgtcatccaggtagccgatcggaaacatgtaatccggaatgacgtcggtcgctaaaatataatacagcagcgcgctcccgagaatcgcgcggtcttcagccggtgttgattcatccatatactgatgatgcatgtttttcaaatgatcaataaaagggccgacgctttcttcattgtccattttcttttgaaactcatcgcaaatcaggcgatggccctgctgggttttggcatattgttcatatctggtcagttcgcgctcaatttgctcccgggaaaaaggctgatcaaacatctcggccatattcagcatatcctgaatcgcgtgcatcgggtcttgcggcgcagcttctttttcatggccgatgtctatgcctgacgcctcaagcaattcctccagcggggtgcggagatgttttgaaaattcctgaagatgctttaaattggccttctgcttgccgtttataatccgggagatggtggccgtatcaatgtttgttaaggcgccgagttttctcatggagagcgagtgcttatcaagcagtgattttaaaaggggccccagtgtcgtatttttattttctgtcaagggtgtcacctcgtttccgccggaatgatgatcattaatcaataatttttgcagaataggtaccttttctgtgctgctgaataggatagtgtagattcaacggcacaacatgttgaaaagacatcaaagaatggagagaaacgaacatggcttggttattgattttaggtttggcagtgtcctcgagcattgataatttaggagtggggatgtcatacggcatcagaaaaatcaaaatatcgcatgcgtcaaatatgatgatcgcttttatctgttttgtattcagttatatcggaatttatttcggtaaatggatttcagccgttttaccgggctttcttcctgtattactggcggcgtttattttatctgtcatcggtatccgcatcattctgctggctgtgccgagaaaaacagcgcgtgttggcgcgtcaggaaaaaaaggccgttttgccggtctgctgcaaaatccggaggcagcggatgccgacggttcgggagaaatcggtatattggaatccatggttctcggggtagccgtatccgcaaatgcgctgaccaacggattaagcgcggggttgatcgggctttctcccgctgccatttccatcactgcggcggtcggaagctttctgaccatatggatcggctgctcgcttggaaaaaaagccgcgtcactgcgcatcggttcttttcacatcggacagttcagcacggtgctgagcggagtgattattctcatcattgccgccaatacgctgctcttttaagttgtcccgttcattttatgaaaagctcaaaataaatatgaatgtttctattcgggagagcgcatgacgcggctctctttttttgccgatctgatattttttcaaaatgaacagaaagtcgtccgtttccgttaaattctgcatattcggccttcagacagaacctttttcatagactgatcagcttgttttctttctaagttcaggtaaacagcaggtcagatagccttcattccaaatatggaaaagcgctggaggaatggaggctccctttacaaatcggtcattctgttcaaagataaagccgaatgagaaaacgtgaggtgatctgtgtgaagtctgtcatacttctgatcttcaccgcatggctgttatcaggctgcgagtataccgcggaggctgatgcggcgccgtcatttacacaggaaggaacatttataaaagcggccggaaacgatacgatcgcggtcgaaattgacggagaaaggcaagaggtgaaggtgcctttcgctaagcggtttgaatgtcagtctctgcctgaacatacggcggtgcaaatcacctataaaaaagagagcaacggacaattacggcttgaggaactgaaaaaagaaacagatatgtgaaaacggggaggaaaaaacgtgggtttactgacaaaaagtgctgctgccttcggtgccgctcttcttctgcttgcgccgtctgcttatgcagctgaacctttgcaagggaaaaccatttatatcgatgccggacatggcggagaagacagcggggccggcggaaatggactgcttgagaaaaacatcaatttagcggtgtcaaacaaggtgatcgccaaattggagacagaaggcgcaaaacctgttgcttcaaggactgacgatacttttttacgtttggacgagcgggtggcgaaagcaagcgccagccaatccgatttattcgtcagcctccatacgaattcagccgtctcaacggcatcgggcacggaaacgtattttaattcgacatatgaaggagcagacagcgaaaggcttgcttccgacatccagcagcagcttgtcacgtctttagggatgaaggacagaggcgtaaaagaagctcctttttatgtcattacatattcaaagatgccgagtgtgctggctgaattaggttttatcacaaatcctcaagatgcggacaagctgaaaagcgataacggacaagagcacgccgcggacgccgttgtaaacggaatcgaaacctattacagcggacggtaattataaaatatgtgtaaatagcgccctccttatgtgcataacgaatataatagagaaaaccgatgacaaacacctgaggtgacacatatgacgaatatttttgcccaccggggggcgtcgggcgactgccctgaaaatacgatgcccgcgttcaaaaaagcgattgaggacggggctgacggaatcgaacttgatgtacagatgacaaaagacggccggatcgtggtcattcacgatgaaacactcgaccgcacgacgtctttgaaaggatttgtgaaagatacggcgtatgacaaaatcagaaccgctgatgccgccggaaaatggaaagatgcttttaaaggtgtcagaattccgcttttgtcagatgtgctgcgttttgcggaacgtgctgattttctgataaacattgagctgaaaaacagtgtattccgttacgaaggaatggaagaagaagtgattaaaaaagtcagatattacggactggaaaagcgcgttattttttcttcatttaatcatgagagtctcgcggtttgctatgccctggcgcctgaaattgagcgggcggtgctgacaatggatgtgctgtaccggcctgaacggtatcttgccgccattcccgcttcgggttatcatccgaagctcggtacgccggcggtgagcgctgaagtgatcaaacatcttgcaaaacaccaagcggcgctccgtccgttcaccgtcaatcgtcctgaggatatgaagcagctgatgaaagcgggagcagacgcaatttttaccgattatccaaagctggctgtttctataaaagaagaatgccgcagctgagaagactgttcagacagtcttctttttttatgggcgggaaaaaggcggtgcactcataactcggtcagccggttcatatattgtaacagttttgtgtaagcgttatcttttatcttattgaaagtgaggcaaaattgtgggaaaaacggttatcgtcagtgcggcaagaacgccgttcggaaaatttggcggcacattaaaagaggtaaaggcggccgagcttggcggcatcgccataaaagaagcaatcaagcgcgccgctatcagtgaaagcgaagcggaaggaacggtgatgggaatggtcgtccaggcgggtgccgggcagattccggcacggcaggctgcaagatatgccgggcttccgtggtccgttccggctgaaaccattaataaggtctgtgcatcagggctcagggccgttaccatctgtgatcaaatgatccgggcgaaagatgcggacgtgctgattgcaggcggaatggaaagcatgagcaacattccgtacgccattccggccggccgctggggtgtgaggatgggggacggggtgtttcaggatttaatggttcatgacgggctgacctgtgcgttcgaccaggtgcatatggctgtccacggaagcactgcggccaaaaagtacggcatttcccgggatgaacaggatcattacgctcttttgagtcagaaacgcgcggctgaggcggccgaggcgggcaaattgcgtgaagaaattgtccccgtcacctggaccggcaaaaagggcaaacagcataccgttgaagcggatgaggggctgcgccctgatacgagccttgagcagcttgcagcgctcaagccaatttttacagccgacggaacggttacagccggaaacgctcccggtgtaaatgacggggcaggagcatttgtgctgatgtcagaggaaaaagccgcgaagcagcatgtcaggccgctcgcagcgatacttggctttgcgtcagtcggactggaagcgtccgagctggccagcgcgccgggagaggccatcagccggctcttgacaaaaaccggactgtccgttgacgatattgatttgtttgaggtaaatgaggcatttgcgtctgtcgtgctggtgagtgaaaaaatagccgggttcagccgggaaaaagtgaatgtaaacggaggggcaatcgcgttcggccacccgatcggcgcaagcggagcgagaatcatcatgagtttaatatacgaattaaagcgtcgcggaggaggtttaggcatagcggctatatgcagcggagcggctcaaggagatgccgtcctgcttgaggtgtactgatcaaaggagggagcgccggatgaagatgaaaacaatcatggtcgcaggtgcgggtcagatgggagcaggcatcgcgcagacggctgcagaagccgggtttgccgtcaagttatacgattgggagccggaaacggtaacaaaaggtcttcaccgcataaagacaaacctggagaaagagcaggcaaaaggacggaagacacagcaggagacagatgccgttttcagccgtatttccccggcagagctcacagaagcgggagatgctgattttgtaattgaagccattgcagaaaacaaaaaagcaaaagcagaattgtttgacacactagataaaatctgtccccctcatgccgtattggcaagcaatacgtcttctcttcccattacggagcttgccgcggccacaaaaaggcctgaaaaagtaatcggcatgcattttatgaatccggttcctgtcatggagcttgtcgaagtcatcagaggactcgccacatcggaagaaacggcggaaacagtaaagaagcttgccgtccggatgaataaaacccctgtcgaagtcaatgacttcccgggctttatatctaatcgcatattaatgccgatgattaacgaagccgtttattgcctttacgaaggagcagcttcaaaggaagccattgatgaggtgatgaagctcggcatgcggcatccgatgggtcctttaacattagctgacttcatcgggctggatacgtgcctttccattatggaggttctctatgcggggctcggagattcgaaataccgcccatgccctctgctcagaaaatatgtcagcgccggctggctcggcaaaaaaagcgggcgcggtttttatgagtacggcagatgacgtaaagatcatgaggggagacggcagccatgcattttacagaagagcacatcatgatgagaaaaatggtgcgtgattttgcccgcaaggaaatcgcgccggtggttgagctcatggaatcaacagatgaatttccggagcggctgattaaaaaaatgggcgaagcgggattgatgggtattcccgtcccggaaacttacggcggggcgggtgctgatacaacatcttacattttagcgattcatgaaatatcaaaagtcagcgcggccgtcggcgttattttgtccgtccacacatcggtagggacaatcccgattttgcatttcgggacagaagcccaaaaacaaacgtatattccgaagctggcagcgggcgaatatattggggcttttgcgcttactgagcctcaatccggatctgatgcgggaagcctgaaaacaacggctgtgcgaaaaggcggttcatatattctgaacggttcaaaaatctttattacaaacggcggagcggcagatctgtatctgacattcgccataaccgatccaggtaagggaagaaagggaatttccgcgtttatcgttgaaaaaaacacacccggtttttctgtcggaaaaaaagaaaaaaagctcggactgttaggttccaatactgtcgaattgcagtttgaccaagcggaaattccgattgaaaaccggctcggcgaagagggcgagggcttttcaatcgccatgaaaaaccttgacgtcggacggatcggcatagcggctcaggcgctcgggattatcgaagcggcgctcggctgctcggtggagtacgccaaaacccgcagccagttcggcagacccatcgcttcgaatcaggccgtttcatttaaattatctgacatggcgacgaatgcggaagctgccaaattattggtctatcatgctgctgatctgtatcagcgagggcttccgtgcggaaaagaagcatctatggcgaagcaattcgcgtccgatgcggcgatgaaagcggcggtggaggctgtgcagattcacggcggctacggctatatgaaagagtatcccgcggagcgtttatttcgggatgcgaaagtcacgcaaatttatgaaggaaccaatgagattcaaaggctgattatttctaagtatcttcttcaataaaaagtgcgcaaaggagcgaaaccatggaatcttattctcccggtttagatggcgtcattgcggtggaaacggggatttctttcctggatacacagcagggcagtattttaatcaaaggccacgatctgattgagctttctaaaacggccggctatatggacattgttcatctcttattggaagacagacttcctgatgcgaaagagaaggcggcgcttgaagaagacgttcggcgcggcgggcaccttcccgaggaaatcttgcacatatgccgtctgctgcccgaacatactcacccgatggacggactgaggacgggtttgtccgcgcttggaggctttgacaaggacatcgatgaccgttcatcttccgtaaatcagcaccgcgtacgcggactgataggcaaaatgccgaatctgacggtcaacagctatcgagtcatcaacgggctggagcctttggcgccggttggaaccttatcatacagcgcaaactttttatatatgattaccggaaaaacgccgtcatctttggaagaagaaatcttcgacaggtcgcttcttttatacagtgagcatgaattgccgaactcaacgtttacggcccgtgtcatcgcttcgacgcaatcggatatttacggcgcgctgaccggagccgtcgcctcgcttaagggaaatcttcacggcggagcgaacgaagcggttatgtacatgcttgaggaagcgaaggatacagacgggtttacacaattattaactcaaaaactcgcaaacaaagaaaaaatcatgggcttcggccaccgtgtctacatgaaaaaaatggacccgagggcgcttatgatgaaagaagcgttaaaaaagctgtctgatctttcaggtgatttccgtctttatcatatgtgtgaagccggcgaaaccgtcatgagggagaaaaaaggcctttatccgaacttagattactacgcagcgccggtctattacatgctcggcatcccgataccgctgtacacgcctatattcttcagcgcacggacggtcggactgtgcgcccacgtcattgaacagcacagccgaaaccggcttttccgcccgcgtgtccgctataccggagcgcgcctgtaaacagatgagaaaggaagatgaaaacatgacagaaccccgccgaatggacgctgtaatcgaagagatttctgactacgtgctccatcaggagattgacagttcagaagcttttactacggcaggacatgtgcttcttgatacgataggctgcggaattttggcgctcagctatcccgaatgtacaaagctgctcggcccgattgtcccgggaacctccgtccccaacggcagcagagtcccgggcacgccttttgttttagacccggtcacggcagcttttaatatcggctgtatcaacaggtggctcgattataatgatacgtggcttgcggcggaatggggtcatccgtctgacaatctcggaggcatattggcttgtgcggattatatatccagagtgcggatttcagaagggaaagaaccgcttaccgtgcgcgatgtgctttgcgcaatgatcaaagcgcacgaaattcaaggaattctcgctttggaaaacagcttaaacagagtggggcttgaccatgtgctgtttgtgaaagtggcgactgcggctgtttgcgcacaaatgctgggcggctcaagagaggaaatcaataacgccgtatctcacgcttggattgataattcaagcctcagaacgtatcgtcatgcgccgaacaccggatcacgcaaatcatgggcggccggcgacgcgacgagcagaggcgtatatttggcccttatggcgcaaaaaggtgaaatggggtacccgacggctctgaccgcatctgggtggggatttcaagacgtattgtttaaccggcaggaaatgaagcttgcccgcccgcttgggtcctatgtgatggagaatgttttgtttaaagtatcctacccggctgaatttcacgcccagacagcggcggaatgcgcggtccggcttcatcctgaggtgaaagaccgcatcgaagacattgacaggatcacgattatgacccatgagtcggctatccggattatcgataaaaaagggccgcttcacaatccggctgaccgggatcactgcctccagtatattacggcaatcgggctgcttttcggagatatcacggcggatcattatgaagaggaaacggcgtctgacccgcgaattgatacattgcggagcaaaatggaggtgacggaacacaaagcgtactcaaaagattacttagacccgaataagcgatccatatcaaatgccgtacaggtgcattttacagacggcacggctacgggacggattgaatgtgaatacccgctcgggcaccggttccgcagaaaagaagccgttccgaagattcttgccaagttttcagcaaacatcagcactcatttttcattgaagcagcagcgtaaaatcaaagaggcctgcgaacatagcggccgaatgcagaagctcagcgtcagtgaatttatggacttatttctcgtataaaataggagggtgacaaacatgacgtggatcgtcagcaagcagtcgtctcaagaggagcttgcagagcggttccgtacgctgatgacagcgccggatctattgcagatccccggcgctcacgatgcgatggccgctcttatcgccaagaaaacggggttttcggctctttatttatcaggcgcggcttacacggcgagcagagggcttcccgatttagggatcatcacgtcggcggaaatggctgaacgggttaaagatctggtccgctcgtctgatctgcccgtccttgtcgatattgacacgggtttcggaggagtgctgaatgccgcccggacggcgaaagaaatgtatgaagcgcgcgcggccgccgtccagatggaggatcagcgcctgccgaaaaaatgcggacatctgaatgggaagcagctcgtgccgattgaagaaatggcgcaaaaaatccaagcggtcaagcgggccgcgccgactcttcttgttgttgcgagaacagacgccagacagcaggaaggattggagggggcattaaaaagggcgtccgcttatataaaagcgggtgctgacgctgtttttccggaagcgctccaatccgaaagtgaattcagagcgttttccaaacaaatcagtgtgccgattctcgcaaacatgactgaattcggaaaaacgccgtattacagtgctgatgaattttccgatatgggctgtcagatggtcatttacccggtcacgtcactcagaacggcggccaaggcttttgagcgcattttccgccttctgaaagaagaaggctcgcaaaaagaggggctttcggatatgcagacgagaaaagaattatatgaaacgatcgcttacgatgactatgaagaactggatcaatccattgccaaaacgatactgccggacgactgaaaaagccctttttttgcaagggctttttttacagcttttttttcctgaaccgcggactgacttgattgcgtttccgatctctgtacagaataaacccggccagaacataaaggccgaacaaaaaaaacgccaatccggccgccccctgaagaaaaagggacggaaacggggaaaacgcatgcccgaataatgcatctctcatcagcttaatgccgagcgccgcgacagcgccggggaggaccagaatcaaaagcgcaacaagccggctcatattcagaaaacccctttacgatatgttttcctttattgtccaatcgaaaaaatattttgtcaagagatcaaaacgtggtaacataggggttgtgcaaattattgcaacgggaaatacaggtgtgcaaattttttcatataaaggggtatcgggatgcagaaggtgctgattataggtgctggtaaaggaggcacggcgctcctacagattttgatgaaaacaaagctgatccggattattgcggtggttgatcaagatccggaggcgcaagggctgcaagaagcccggaaatatggaattgcaacctcatcagattggaaaccctacataactgaagatatagatattatcatccatacaacaggcgataaagcggtcatggatgagctgctccatgagaaaaaagaacaaaccatcgtcatgccgggaaaattggcgtacatggtgtttcagctgatggaggaaaaacagcagcttatccaaatgctgaagtcgcagacgtataagcatgaccggatttttaattcaacgcacgacggcatgatttttatagacgtcaacgaaacgatcattttatttaatcagatggcagaaaaaatggtcggccaaaaacgggaggatgtcatcggccgccaaattaaagatgtagtgccgaacacaaagctgccgcggattctggaaacgagagagccggaatataaccagaagcagcttctcggaaagcacctgcagattgtcacgacaagactgccgatcattgatgaaggcggaaaacttcttggcgcgttatgcgtgtttaaagatatcaccgacgcagttgaactggcggaagaggtcacgaacttaaaacaaatccgcaccatgcttgaagcgattatacaatcatccgacgaggccatttctgtcgttgatgaaaacggcatcggaatgttaatcaacaaagcgtatacaaaaatgaccgggctgtcagaaagcgaagtcatcggaaaacccgcttccaccgatatctcagaaggggagagcatgcacctgaaagtattggggacaaggcggcccgtgcggggtgtgagaatgaaggtcggccccaataaaaaggatgttatcgtaaatgttgcccccgttattgtggacggtattttaaaaggcagcgtcggcgtcatccacgacgtgtcagaaattaaaacgctgactgctgagctgaatcgggcgcgccagatcatccgcacgcttgaagcgaaatacacgtttgacgacattatcggcacgagtgagcaaatgctggtcgcccttgaacaggcgaagctcggggcgaaaacgccggcgacgattctgctgcggggagaatccggcacaggaaaagaacttttcgcccacgccatccataatgaaagcgaccgaaaatacaataagttcattcgggtcaattgtgcggccttgtctgaatcactgctagaatccgagcttttcggctatgaggaaggcgcgtttacgggcgcgaggcgcgggggcaaaaaaggactatttgaggaagcgaataacggcagcattttcttagatgaaatcggagagctgacccaaagcacccaggcaaagctgctcagagttctgcaggaaaaagaaattatcagagtcggcggcgctaaagcgatttctgtcaatgtcagaattatcgcagcgacaaacgtcaacatcgaaaaggccatggcggaaggcgcgttccgtgaagacctgtattaccggattaaccgctatccgatctcaatcccgccgcttcggcagcgcaaagaagatattgaagcgctgagcattcggctcattgaaaaaatcaatcaggattacggccgcaatgtaaaggggctcacgccgaacgcgctgcgagctttatcagcctacagctggccgggaaacgtccgggagcttgaaaatgttctcggacgggcaatgatatttttagagccgcacatggaacggatcgaacagcagcatctgcctgtttttgaatcagagctgaatgaaaaaaacggcacccaaagtgattttccggatgtggaaggggaaaagctgtctcaggctgttgaaaaatttgaagcgcacgtcattcaaaaaacgcttgaaaagcataaattcaaccgaaccaaaacggcaaaagcgcttggtgtcagtattcggaatctgtactacaaaatggataagtacggccttgcaaatgacggcatgcaataaattgcagagaaagcgcaaacagctgcatgttttcttgaagaaagccggaataaaccctcccgcacatttggcacggaacttgcattgttaaaagcggattcgcacaaggaaggtggtacaaaatgaagctgagagacctagttgaaaaagccgcggcaaaaaacgcaaaaaccattgcagtggcccacgcagcagataaagaagtgatccaggccgtcaaaatggcggcagaacacttgtcggcacgatttttactgacgggtgacagcggaaggctgaaagagcttctcgcaaatgagccgaagttcaatgctgaaatcatccacgccgattcacccgaagaatctgcggcaaaagcagtgcgcgcagtgcgtgaacaagaggcggacgttttaatgaaagggaatctcccaagctcaactcttctgaaatcggttttaaaccgccatgaagggcttcgttcaaaaagggtgttatcacatgtagccgtttttgaggtgccggactatgaccggctgatgtatgtgactgattcagcgctgaacattgccccgtctcttgaagagctcgggcatattctgcaaaatgcggttcatgtcgcacattcagtagggaaccctatgccgaaagccgcagtccttgccgctattgaaacggttaatccgaaaatggaggcgacccttaacgcggctgcgatcgtccagatgtgcaacagaggacagattaccggctgcattgcggacggaccgcttgctttggataatgccgtatcccaagcggctgcgctgcaaaaagggatttccggaagcgtagcgggccaggcggatattctcttggttccttcaatcgaggccggaaatatgctttataagtcaatgatttattttgcgaaagcaaatgttgctgccgtcatcgccggtgcaaaagcgccgatcgcattaacgagcagagcggataccgcagaaaataaactgtattcaattgcgcttgcgatttgcgcatcacaagaacagtaggaggaacgaacctatggaaatttttaaatatatggagacttatgattacgaacaattggtattctgccaagatgaacaatccggattaaaagcgatcatcgcgattcatgatacgacgctcggccctgcactcggcggaacaagaatgtggacatatgacagtgaagaagcggcgattgaagatgcactaagactcgcaaaaggcatgacttataaaaatgcggctgccggtttaaacttaggcggcgggaaaaccgttattatcggagacccgcgcaaagataaaaatgaagaaatgttccgcgcgttcggccgctacatccaaggcttaaacggaaggtatattacggcggaagacgtcggcaccaccgttgaagatatggacatcattcatgatgaaacagactatgtaaccggaatttctccggcattcggttcatcaggaaatccgtctcccgttacggcgtacggcgtctacaaagggatgaaagccgcagcgaaagcggcgtttggcactgattccctggaaggtaaaacaattgccgtgcaaggcgtgggaaatgtggcttacaatctatgccgccaccttcacgaagaaggcgcttctttaatcgtaacggatatcaataaagaatctgttaaacgtgccgttgaggacttcggcgcccgcgcagttgatcccggcgacatttactcacaggcgtgcgatatttatgccccatgtgctctcggcgccgtcattaacgatgacacgattaaacacctgaaggcgaaagtcattgcgggagcggccaataaccagctgaaagaaacacgccacggcgataccattcatgaaatgggaatcgtgtacgctccggattatgtcatcaatgcaggcggggtcatcaatgtggccgatgagctttacggctacaatgctgagcgggctttgaaaaaggttgaaggcatctatgcaaacattgagcgggtgctcgatatttccgcgcgtgacggcattccgacatacttagcggccgaccgtctggctgaggaacgaattgagcgcatgcgccgttcaagaagccagtttctgcaaaacggccaaagtatattaagcagacgataggaatttgatctggaggtatgaaaatgttcgaaaaggaaaaacgcattctcattctgaatccaggctcaacatcaacgaaaatcggtgtctttcacaatgaacgctgtatctttgaaaagacgctgcggcatcccgaagaagagctgaaaacatttaacagcatcatcgaccaatacgaatttcgaaaaataagcattcttgagtctttgcacgaacagggcatcaacatttcaaagttcgatgccgtttgtgccagaggcggcctgctcagaccgattgagggcggcacatatgaagtgaatgacgccatgatcactgatttgaaaaatggctacaacggccagcatgcttctaatctgggcggaattattgccagggaaatagctgacggattaaatatccccgcgtatatcgtcgatccggtcgtggtggatgagatgactccgctcgctaaagtatcaggaatgcctgaaatcaagcggaaaagcattttccatgctttgaaccaaaaagctgttgcccgtcaggcggcggcgtccctcggcaaacggtatgaacagatgaagatgatcgtcactcatatgggaggcggcaccacagtcggtgtccatgattgcggacgggtgacggatgtcaacaacgggcttcacggagaaggacccttcagcccggagcgcgcgggaactgttccggcgggtgatttggtagaaatgtgtttttccggcaagtattcaaaagccgatatgatgaaaaaacttgtcggcacgggcggactctccggctacctggggacaacggacgcggtgaaggtggaaaaacgcattcaggccggcgatgaaaacgcgcgtctcatttatgacgccatggcttatcaagtagcaaaagaaatcggggcggcaagcgccgttttaaaaggaaaagtagacattatcgtcctgacgggcggattggcgtacgggaaaagtttcgtatccgccatcaaatcgtacatagattggatttcggatgtactggtgtacccgggagaaaatgaactgcaatctctcgcgcaaggcgcgcttcgggttttagccggtgaggagcagtcaaagcaatatcagatcggcgaaggagtgaaaacaaatggcgactgagtatgatgtggtcattctgggcggcggcacgggcggctatgtagccgccatcagagcggtccagctcggcttaaaaacggccgttgtagaaaaagaaaagcttggcggaacatgcttgcataaaggatgtatcccgagtaaagcgctgttaagaagcgcggaagtgtaccgaaccgcaaaggaagcggcagcattcggcattgaaacggaaggtgtctccctccgctttgacagcgtgcaaaaacgaaagcagggaatcgttgaccggctggccggcggtgtcgcccacttgatgaaaaaggggaagattgatgtattcaacgggtacggacgtatgctcggcccttccatcttctcacctcttcccggtacggtttcagtcgaatacgcaaatggtgaagaaaatgacatgctgataccgaaacaattgattatcgcaaccggttcaaggccgaaaatgctgccgggtttagaagcagacggtacatatattctgacatcagatgaagcgttagagcttgaacgtctgccccactccatgatgatcgtcggcggcggtgtcatcggaattgaatgggcatccatgctgaaggatttcggcgtcaatatcactgtgattgaatatgcggaccgcattttgccgacggaagaccgtgatatttcaagcgagatggaaaaactgttaacgaaaaaaggaattaagatcgtgacgggtgcgaaagtgcttccggatacattggaaaaagcggacggcgtttcaattgccgctgaaaagaatggaaaaaaagaaacgtatcacgcggaacaaatgcttgtttccatcggccgccagccgaacattgaagggatcgggcttgaaaacacggatattgaagcggaaaacggttctatcatcgtgaacgaagccgggcagacgaaggaatcgcacatttatgcgatcggtgatgttgtcggcgggctgcagcttgcgcatgtggcctcccgtgagggcatcattgccgttgagcatatggcgggtcttaatccggctccgcttgatgccgctcttgtgccgaaatgtatttattcaaatccggaagcggcgagcgtcggtctgacagaagaggaagctcttcgaaaagggcatgaactgaagatcgggaagtttccgttcatggcgatcggaaaggctcttgtatacggagaaagcgacggctttgtcaaaatcgtcgccgatcggaatacagatgatattctcggtgttcatatgatcggcccgcacgtcaccgatatgatctctgaagcggggcttgccaaggtgctcgacgcgacgccttgggaaatcggccagtccatacatccgcatccgtcgctgtcagaagcgattggagaagctgcgttagccgcagacggaaacgcgattcatttttaaaaggaaagaaggaggggtttgaatgactacaaaccgccatcaagcattagggctctctgacgaagaagccgttgaaatgtatagaaccatgctgttagccagaaaaatcgacgaaagaatgtggctcttaaaccgctcgggcaaaattccgttcgttgtttcatgtcaaggacaggaagcggcgcaagtaggcgcggcctatgccttaaaccgtgataccgactatgtgcttccgtactacagagatataggggttgtgcttgcattcggtatgactgcaaaggatttgatgatgtcgggttttgcgaaagcagctgacccgaactcaggcggaaggcagatgccgggccacttcgggcaaaaggaaaacagaatcgtaacgggctcatcccctgttacgacgcaggttcctcatgcagtcggaatcgcgcttgcgggacgcatggataaaaaggatatcgtctctttcgttacctttggagaaggatcttccaaccagggggattttcacgaaggggcaaactttgccgccgtgtataaactgccggtcattttcatgtgtgaaaacaataagtatgctatttctgtcccgtatgacagacaggtggcgtgcgagaaaatatccgaccgggcggcaggctacggcatgccgggagtcactgttgacggaaacgacctgctggaagtttaccgggtcgtaaaagaagcgcgcgaacgggcgtctaaaggcgaaggccctacattaatagaaacggtttcctaccgtttgacgccgcattccagtgatgacgacgacagcagctacagagaacgcgaagaagtagaagaagcaaagaaacaagatccgcttcttttatacaaagcatacttgcaagaagccgggcttctaggtgaagaagaagaaaagaccatgctggatgacatcatggctatcgtaaacgaagcgacagacgaagcggagaaagcgccatacgcatctcctgaatcaacgcttgatcacgtttatgcgaagtagggaggaatacttatgtctgtaatgtcttatattgacagtattaatgcagcaatgaaagaagaaatggaaagagatccgcgcgtgtttgttctcggggaagacgtcgggagaaaaggcggcgtgtttaaagccacggcgggtctctatgaacagttcggagaagagcgggtgatggatacgccgcttgctgaatcagcgattgccggtgtcggcatcggcgccgcgatgtacggcatgcgcccgattgccgagatgcagtttgccgatttcattctgcctgcggtcaaccaaatcatttcagaagcggcaaaaatacgctaccgttcaaacaatgattggagctgtccgatggtcatcagagcgccttatggcggcggcgtgcacggcgcgttgtatcattcccaatctgtggaggctatttttgccaaccagccgggccttaaaattgtcatgccttcaactccttatgacgcaaaagggctgttgaaagctgcagtccgtgacgaagatccggtgctgtttttcgaacataagagggcgtaccgtctgattaaaggcgaagtccctgcggatgattacgtccttccgatcggaaaggcggatgtaaaacgcgaaggcagcgacattactgttattacgtacggattatgcgtccattttgctctgcaggctgccgagcgccttgaaaaagacggaatttccgcacacgtattagacttgcgtacggtttatccgttagataaagaagccatcattgaagccgcgtctaaaacgggaaaagtattgctgatcacagaagatacgaaagaaggcggtattatgagcgaggtcgccgccattatttctgaaaactgcttatttgatttagacgcgccgatcaagcggcttgcaggtcctgacgttccggcaatgccttatgcgccgacaatggaaaaatacttcatgatgaatcctgacaaagcagaagccgcgatgagagaattagcggagttttaaagacgtaaggaggtttttgacatggcgattgaacaaatggctatgcctcagctcggagagagcgtgacggaagggacgatcagcaaatggctggtatcccccggtgatcaagtgaataaatatgaccccatcgcggaggtcatgacagataaagtgaacgcggaggtgccgtcttcttttaccggtacgattacagaacttgtaggagaagaaggccagactcttgcagtcggcgagatcatctgcaaaattgaaacagaagaaacggaaaccgaagcggcgccgaagcgggaagaagagcagaataccccttcagacacagatgcaaaccgtcaaggtaaagatcagtcaaataaagcgcgttattcgccggccgtgctcaggttagcgggagaacacggcattcagcttgaagaagttgaaggaacgggtgcaggcggaagaattacgcgaaaagacattcaaaagatcattgattcgggaatgaagcagaagtcggaagcaccggtgccggctgccgttcaaacaacgcaacaagcgccgaaacaacagcaaaaacaagcgccggcacccgctctgtcagccggtgatattgaaattccggttacaggcgtcagaaaagccatcgccgccaatatgcataaaagcaaaacagaaattccgcatgcctggacgatgatggaagtggacgtcacgaacatgacggcgtacagaaacagcattaaagactcatttaaacagaaagaaggcttcaatttaacgtttttcgctttctttgtaaaagcggcggcgcaggctctcaaggagttcccgcagatgaacagcatgtgggcgggagacaaaatcgtccaaaagaaagacatcaacatctccattgccgttgccacggaagattcgctgtttgttccggttattaagcatgctgatgaaaaaacgattaaaggcatagccagagaaataacagaccttgcgaaaaaagtgagaaacggaaaacttaccgcggaagatatgcagggcggcacatttaccgtcaataacacgggatctttcggctcagttcaatctatgggcattatcaaccatccgcaggcggcgattcttcaggtagaatctatcgtcaaacgtccggttgtcatgaataacgggatgatcgccgttcgtgatatggttaatatttgcctgtctttagatcacagagtgctcgacgggctcgtgtgcggccgattcctcggacgcgtcaaagagatcttagaaaacattgatgaacatacttccgtctattaaaaaaactccttttgcccgggcggcaaaaggagcttttttattttcattgtgaatcctcgggaacaatcatagtgagatgatgttttttcacttcgatcgtacaaggtgttgttccgtatacctcgccatctgtatccgcgtccatctcacgtccggtttcgatttcaatcctggaggcctgaatataggacagctcccctttgaaatcatcaaacgaaccctgttccatcgtcatcagctcccgcaacgcggcaaggcttgtgttgcggcagattaacacatcggctaagccgtcctggaggctggcatcaggcaggggaactctgtttgtcccgatataatgcccgttcatgacaagcaccattacggcttcgtcttctttcacttcaccgtcaatcgtcaatttgacaggaaacgggttcgcgcttgtcatcgtccgcaaggcgctcgtgaagtagctgattttaccaagccatgctttttcagtttcattaatatggcttgatgcttcggtgatcagtccgatgccccagaagttcagaaaatagccgtcatccgttttacagacgtcaatcatccgtttatgtccggccgcgagcgcttcagcggccttttgaaggttttgcgggatgccgagcgcccgggagaaatcgttgcacgttcctcccggcaaaatgccgacagcgggtctgtgatcaagcttgctgatgctgttgatgcattgatgcacagtgccgtctccgcctaaaatatataaatggtcaactgaactgtcgagattttcacaaaactgacgggcatcatcctgatgtttggtcggtttaatcaaaagttcgtcagctgactgggccaaaatggggacgaccgtgccgagcgttttatcaatctgtttttgaccggcgtttccgttataaattaaaactgctttccgttggctcatatgactgctcctttatttcagacaatctccttaacaagtttcccgtttttaaagggtcataaacttacatcgggaacataaaagggacaaaaaacaattggatatgagcggtgtcatttgccgatagggaggttccttgctatcataagaagagatgatcaaaaaggagaggtcccagttgaatatggattttaatttatttatgaatgatgtcgtgcgtcaagcccgccaggaaatcacggccgccgggtatacagagctgaaaaccgctgaggaagtggacgaagcgctttcgaaaaaaggaacgacactcgtcatggtcaactctgtgtgcggatgcgcaggcggtattgcacggcctgccgcgtaccattccgtacattacgataaacgcccggatcagcttgtgacggtatttgccggacaggataaagaagcgacagccaaagcgagagaatactttgaaggctatccgccgtcctctccgtcatttgccattttaaaagacgggaaaatcatgaaaatggtggaacgccatgaaattgaaggccatgagccgatggccgtcgtcacaaaactgcaggaagcatttgaagaatattgtgaagaagtataagtgaaagaaaaaccccggagccaagcgcttgcggggtttttttatatggcatctgtataaatataaatatttatacatcggcgttcagctgtcactaacctgaaaaacaatgactataataaacacagaaaggaaaatatatttttcaaaaatagtattgcatcacaattaaaaagtgtttaaaatacaagttaacgaataaatattcaaatttaagagatcagtagatatgggggaaatgaatcatgaagaaatggctgttggtattagctgccgcatgtatcacctttgcgctgtccgcctgcggatcaggcaattcaggctcagaaggcggaaagaacaagctgattatgggtacatcggctgactataaaccatttgaatataaagacggcgatcagatcaccgggtttgacgttgatctggcaaaagctctgggcaaaaagaccggctatgacgttgaggtgcaggacatggacttcaacagcctgattacagccttgaagtccaagcaggtagatatgatattatctggaatgacacctacgccggaacggaaaaagcaagttgatttttctgatatttattatactgctaacaatatgatcgttacgaaaaagggaagcagcattaaatccttgaatgatctgaaaggcaaaaccgtcggtgttcagctcggctccattcaagaggaaaaaggcaagaagctcgcttcgaaatacggttttcagctcgaagaccgcaaccggatctcagacttaaccgaagagatcaaatccgggcgttttgatgccgcgattatcgaagacatcgtagcacaaggctatttcagttcaaatcaagatctgcagggctttgcgtcagcagatgcgaaatcagacgaatcgggttccgcgattgcgttccgcaaagacagtgatctgacagcgaagttcaacaaagcgctgaaagaaatggagaaaaacggagaaatcgaaaaactgaagaaaaaatggttcaccaacgagaaataaaagaaagctcaacttttcgttgagctttttatcttgaataaagacaaaggagatcacacgtatgaatttggatttctcagcgacaatcccccaaattccttttatattggaaggccttgcggtcacattgaaaattgtgctcgtttcggcggtcatcggtcttgtattaggcatcgtgctcagcttatttaaaatcagcacgatcagtccgctgaaatggattgcggatttttatacttcgatattccgcggcacgccgctcgtgctgcagctgatgatcatttatttcggtatgccgcagctcctcggctttcagatcgatcaattttgggcggcggtcactgcattatcgctcaattcagccgcttacgtctctgaaattatcagagcgggaatcaacgcaattgacaaaggacaaaaagaggctgccgtcgctctcggcgtgccgtacggaaaaatgatgaaagatctgctgctgccgcaggcgtttaaaaacatttctccggctattattaacgaattaatcaccttaacgaaagaatcggcgatcgtcacagttatcggtcttggcgacattatgagacgggcctaccagtccggcgccgcaacatacaactatttagaacctcttattgtggcgggcttaatctattacgtgctcgttttgatcttagcattcatcggaaaaggcgtagaaaggaagctgaaagccaatgattaaggtcgacaacctgtcaaaatcattcgggaaacatgaagtactgaaaaacatttcaacacagatcgaagaaggggaagtcgtcgctgtcatcggcccttccggttccggcaaatcaacgtttctgcgctgcttaaatctgctggaaaccccgagcggcggaacgattgccattaaagaaaatgaaattaccgcagctaaaacgaataaactgaaagtgcgggaaaatatcggcatggtatttcagcattttcatttgtttcctcataaaacggtgcttgaaaatatcacatacgcgccggtcagcgtgaagaaagagtctaaaaacgaggcggaggaaaaggcgtgcgccctccttgaaaaagtcggactgcttgacaaacggaacgactatccgaaccgtttgtcaggcggacagaagcagcgggtcgccatcgcgcgtgcgcttgccatgaatcctgacatcatgctgtttgatgaaccgacctcggctcttgacccggaaatggtcaaagaagttcttgaggtgatgaaagagctcgcgcagacgggcatgacgatggtgatcgtaacgcacgaaatgggatttgccaaagaagtggcagaccgcgtattattcatggatgaagggacgatcgtggaagacgggcagccggaagaattttttctttctccgaagtcaaaaagagcacaggactttttagaaaaaatattataaaatataactgtaagaaaagaagaagaatgctcttcttcttttttttgagaaagaaacaaacagaatggagcaagcaatgtttaaaatcggttaccgcacactaaagaccgcacttggaacggcgctggccatttatttagcccagctgttgcatctgcaaaacttcgcatccgcaggaatcatcaccatattgtgcattcagattacgcaaaagcggtcgcttcaggcctcgtgggcccgatttgccgcctgtttattggcgatcgtcttctcatatgtctttttcgggctgatcggctattatccgtttgcgatcggaatattgctggtgctgttcattccgactacagtcgttttaaaaataaacgaaggaattgtcaccagctcagtaatcattcttcatttatatatgtccggcggcattacgatggcgtttatctggaatgagttccagctgatcaccgtaggtatcggcgtcgcgctgttaatgaatctgtatatgccgagcctcgacagaaaactcgcggcataccggaaaaaaattgaggacaacttttccgtcatcttcgccgaaatcgaacggtatttgttaactggtgagcaagattggtcggggaaggaaataccggagacgcatcagatgattcaagaggcgaaaaacctcgcctatcgggacgtgcagaatcatattttgcgccatgaaaatctttactatcattattttaagatgagacagaaacaatttgaaatcattgaacggctgctgccgaagattacctctatttcaataacggtggagcagggcaaaataatcgcccatttcatccatgaattaagggaagccattcatcccggcaataccgctcataaatttttaaaaagacttgcagaaatgagaacggaatttgaagaaatgccgctcccggcaacgcgcgaggagtttgaagcgcgggcggctttgttccacctcctcggtgagatggaacaatatctcgtgattaaaagttatttcaaaggcatcaagctgtaaaaaacatatggatcaatcgcatgagtcctcctttcattggtcattctaatgaaaaaaggaggggagcccatgcgattttttttattgtcagccgccctgctgatgtctccgctttggccgcttggcgcaaaccctttgccgggtgacccttatattatcgtcaataaagccacaaatgcgcttgctgttgtgaaggataaccgaatacaaggcatttatcaggtggcgacgggaaaaacggatgatttgacgcctgaaggagaatttacggtaacggtcaaagccgtcaatccgtattaccggaagaaaaatgtagagggaggcgcgccggaaaacccgctcggcgtccgctggatcggctttgacgcgaaaggaaccgacggcaggatatacggcattcacggaacaaacagagaagagctgatcggggggtttgtgtcaaacggctgcatccgtatgaaaaaccgggatgtcatccgtattttccggattatccctcccggaacgaaagtattgattacaaaagaaaaccgctcattcgaggacattgcaatagagcggaaagccctcataaaaaagcaggaaccccccttgcaatgaggcgcctgcttttttaccgcaaatacatcataatgcctgagaggagggttgaaagaataaatacgcccaaaatgacgatgacggcgcttttcataaatttttgagacattgtttcactccttaagattactgtctatcattttaacgtgttttgcttgtatgaacaagccatatcctatggcggaaagcaggtggccgcgctatgaaaaaacttgatcatgtcggcattgccgtcagctctattgaagccgcgagaggattttacgaacggatgctcgggcttacgtatatgggagacgagctggtaagcggccaaaatgtgagagttgcttttttagaagcgggaggcacaaagcttgagctgattgagccgctgtcggacgcgtctcccgtcagctcttttttacagaaaagaggcgaagggctgcatcatttggcattccgctgcgccgatatgaaggaaacgatcaaggagcttgaagcatgccgcatgactctgatccatcatgaaccgcaaaacggagcgggcgggaagaagatcgcatttctctctccaaaagaggcgaacggggtcctgattgagctttgtgaaacaattgaaaaaggagaaactcaagatgagcatgagtgatcatatcagacacttaaatgaaagacgttcctttttaacaaacggcggcggagcggaaaaaaatgaaaaacagcacaaaaaaggcaagctgacggcaagagaaagaattgactatttattggacgaagacagtttttcagagctgcagccgtttgccaaaagccgcatgcccgggtcccgaaatgctccgggagacggcgttgttaccggatacggcacaattgacggacggcccgtgtatttgtttgcccatgactttaccgtactcggcgggacgctcggcgagacacatgcggaaaaaatcgcggcggtaatggatctggcggcgaaaaataaaactccgatcatcgggctgaacgactcaggtggtgcgagaattcaagagggtgtggtatcattaaatggatacggtcatatctttaggcgcaacgtcctttactcgggagtgattccgcaaatctctgtcatccttgggccgtgtgccggcggtgctgtttattcacccgcattgacggattttgtgattatggcggaacatacgtcgcacatgtttattacaggcccgaaagtcattgaacaggtgacgggtgaacagattgacgcggaaagtttaggcggtgcgggaatacataatgtgataagcggaaatgcccactattccgcacgaacggaaaaagaggctctttccgctgtgaaaaccctgctttcttatctcccgcacggcggacagacggcattgcccgttaaaaaggaagacgccagaccgttattaaacaccctcgttcccgcggacagttcgaaaccttacgatatgttacaggtaataaaagagctggcggatgacggaacgttttttgacattcagccgtattttgccaaaaacattgctgtcggttttctgaaactcggacggcgtacagtcggtgttgtcgcaaaccagccgaaacacttggcggggagcctcacgattgatgccgctgacaaagcgtcgagattcatccgtttttgtgacgcgtttcatattccgctattgacgatcgctgatgttccgggatttcttccgggctttcagcaggaacatgcgggaatcatccgtcacggagcaaaattgctgtatgcttttgccgaagcgacggtgccgaaagtgacgctcatcatcagaaaagcttacggaggcgcctatgtcgccatgaattcgaaagggctcggggcagatcttgtattcgcctggcccaatgcggaaatcgccgtgatgggagcggaaggcgcggcgtcgattttatacagcagagacatacaggcttctgacgacccggagaaaacgaagcgcgaaaaaaaagccatatacgaaaaggaaaacgccggtccgtataaagcagcggcctgcggaatggtggatgatatcatccggccggaagactcgaggaaaaaattgattcaggcatttgacatgcttgcgcataaggaagaggaaagaccgaaaaaaaagcacggtaatataccgctttaaacggagggaactgaaaatggtaaacgaaaaacgtctgcttgaagaatttcttgaactcgttcaaattgattcagagacaaaacatgaagcggaaatcagcaaggtgctcaaacaaaaattcactgatttaggattgagcgtaaaagaagatgatacaaaagaagtgacggggcatggagccggcaacttaatctgtacgttaaagggcacaaaagatgcggatacgatttatttcacatcgcacatggacacggttgtcccgggcaaaggcgttaagccgattgtggaagacggctatgtaaaatccgacggcacgacgattctcggcgctgatgataagacgggacttgccgcaatgtttgaagccattaaagtgctgaaagaacaaaacatcgagcacggcaccattgaattcattatcacggccggagaagaatcgggattagtcggggcaaaagcaatggatcgttcagacattaccgcgaaatacggttttgcgcttgattcagacggaaaagtcggcaacattattgtagccgcaccgacacaagcgaaagtgagagcaaccattttcgggaaaacggctcatgcgggggtagaaccggaaaaaggcatctccgcgattacaatcgcatcaaaagcaatctctaaaatgccgctcggccgtattgataaagaaacaacggctaatatcggacgtttcgaaggcggcacgcaaaccaatatcgtctgcgaccaggttgatattctggctgaagcgcgttcattagtgcctgaaaaaatggaagcgcaagtgcagaaaatgaaagaagctttcgaatctgctgcagctgagatgggaggccgcgcggaagtggacatcgcggtcatgtatccgggtttcaaatatcaggacggcgatcaggttgtggaagtcgcgaaaaaagcggcggcaaaaatcggccggccgagcgaacttcagacaagcggcggcggaagtgacgcaaacgtcattgccggccacggcattccgacagtcaacctgtcagtaggctatgaacaaatccatacgaaaaatgaaaaaatgccgattgaagagctcgtcaaaacggcggaaatggtcgttgccattatcgaaacagcggccaactaaaaacgaagcacccagttgtttgggtgcttttttcattcttcatgataattggtttaaagccttgcagatacaagaaaaaaccctgccggataggttccggcagggtttcagtattatgatttggcgggctccgcctgagccgcagcttgtttctttttatgatgcgtctgctgtaaaagtacattctgcactgtcaaaaacagtccgcttgtaaaccagtaaagcggcagcgcagccggtacgttaagtgaaaaaacggtcatcatgacagggaaaataaagaccatgatttttgctgactgcatcgcggccggattttgagcagccggtgaatatttctcgtttaatttttgggaaatataagcctgtaagaaatacatggcccccgcgcacagtgatacaagaatatcagaatgccctaagctgaaccacagaaatgagtgtgaagcgatttccggcgttgagcggatggcgtaataaaaaccgatcaaaatcgggaattgcaccagcatcggaagacatcccattgccatcggattcagattgtgctcacggtaaagcttcatcatttccatttgcagttctttttgtttctccgcatctttcgtttgtttcattttagcctgaatgctgtcgacctgcggtttgatcacagccattttttcctggaacacccgctgtttcttaaattggttcacaaacaaaggcaatacaacgatccggacgataatcgtcaccagaataatcgacagtccgtactcaccgtggaacaggcccgccacaccttttaaaagtgccgaaaacggctcgatcaggtaatcgtggaaaaacccgatattcccgaggcctcccgtctgagtctgagatgtcgccgcaaaagccgagcggcctgtgcacagtacgataaaaaacaatccgaatgcgatccatttttgatatgttttagacaattatgtctcctcctttttatcttcacttgccgttataaaaggaggaagctgacatcttcatcatcattcgccggtgaattcatgcggatgactttacgtatccaagttgtaatgcgatgatatataataataagaaagtctgttcggttcagctgaacgactgcttgatgttcatctattcgtttcgttctccaatgctcgcctgcgcggcgctcacgcaaaagaaaagcgatgccgatcgcggtcagagcgggaagaataattgtgaaaaaatcgactaaaaataaaaagtcattcattgactcaagaatcattttatcacatccattcagctcttattttactacatatatataaggttgtctatgaaaggaaaggaggcgccgggagtggccggaaaagggagaattatatttcatatcgatatgaacagtttttatgcctccgtagaaatggcgtatgatccgtctttaagaggaaaacctatcgccgttgccggaaacgtgaaggaacggaaaggaatcatcgtcacctgcagctatgaagcgagagcgcggggcgtaaagaccaccatgccggtgtggcgggcaaaacgcctctgtccggaactcatcgtcgtgcctccgaattttgaccgctaccggagttcatcaaaagaaatgttcagcattctgagggagtatacggatttagtcgagcctgtttctattgatgaaggatacatggatattacggacacaccgcacagacacagggcgtatgagacagccgaagacattcaggcgagactgcaaaaagagcttttgcttccgtcaagcatcggcatcgccccgaataaatttctcgccaaaatggcgtctgacatgaaaaaaccgctcggcatcaccattttaagaaaaagagagctgccggacgtcttatggcctcttccgattgaagagatgcacggtataggaacgaaaactgcggaaaaaataaaaacgctcggcatcaaaacgatcggtgatttggcaaaaggagatgaacatgcgctgaaaacgcttctcggcataaacggcccgaggctgaaggataaagcgaacggcatccatcctgcagaagtcaatcccgagcggatatatgaatttaaaagtgtcggcaactcatccaccctgtcgcatgattcggctgactgggatgaattaacgggcgtgtttgaccggctcgcgctgtctgtgagcgaacggctccagcgtaaggaggtcatggcctgccggctgttcatcatgattcggtatgcggattggaaaacggtcacaagaagcatgaccctcagcaatccggctgatcagaaaaaagacatcatggaagcggcgatggaactgtttgacaagcactggaaccaaaatccggtaaggcttctcggcatcaccggaacggaactggttgaaaaacagcaggcgtataaacagcttgatctgttttcattcaaggaggacgcaaaggatgagccgatttttcagatgatgaacgagctgaatgaaaagtacggccaaaacctgatcagaaaaggcgccgttataaaaaaagaagaaagcaaaacaaggggaacgagctttaacagagacttttttcaggatgaaaagaaaaggtgaataacttgaaaaaaggggttatgtatgataatttctttagtataaatatcattttattttaatttaaattttaaaatggttaaacgtttgaagaagggacgttagaatatgtcaaaacaacaaatcggagttatcggtcttgcggtaatgggtaaaaatctggctcttaacatcgaaagccggggattttctgtgtctgtatacaacagatcaagcagcaaaacggaagagtttttagaagaggcaaaaggcaaaaatgttgtcggtacatacagcattgaggagtttgtccagtctcttgaaacaccccgtaaaattttattaatggttaaagcgggaactgcaacggatgcgacgattcaatctcttcttcctcatctggaaaaagacgatattttgattgacggcggaaatacatactataaagatacacagcgccggaacaaagagcttgccgaaagcggcattcactttatcggaacgggtgtatcaggcggtgaagagggagcgctgaaagggccttctattatgccgggcggccaaaaggaagcgcatgaactcgtgaaaccgattttagaagccatttctgctaaagtggacggagaagcttgtacgacatacatcggcccggacggagcggggcactatgtaaaaatggtgcacaacggtatcgaatacggtgacatgcagctgatctctgagtcatatttcattttgaaacaggtgctcggattgtctgccgaagagcttcacgaagtattcgctgagtggaacaaaggagagcttgacagctatctgatcgaaatcacggctgacattttcactaaaaaagatgaagaaacgggcaaaccgcttgttgacgtgatccttgataaagcaggccaaaaaggaacgggtaaatggacaagccaaagcgctcttgacttaggcgtgccgcttccgattatcactgaatctgtttttgcgcgtttcatttccgcaatgaaagaagagcgtgtgaaagcaagcagccttctgtccggaccagacgttaagccggtcactgaaaataaagaagagctgattgaagcggtcagaaaagcgctcttcatgagtaaaatctgttcttacgcacaaggcttcgcccaaatgaaagccgcgtctgaagagtataactgggatctgaaatacggtgaaatcgcgatgatcttccgcggcggctgtatcatccgcgcggcgttcctgcaaaagatcaaagacgcatatgaccgtgaaccggagcttgacaacctgctgttagacagctacttcaaaaacattgcagaaagctaccaaggcgcccttcgccaagtgatttcacttgccgtagcccaaggcgtgccggtaccttcgttctcaagcgcacttgcgtattacgacagctaccgtacggcagtgcttcctgcaaacttgattcaagcgcagcgtgattacttcggcgcgcatacgtatgaacgcacagataaagaaggcattttccatactgaatggatgaagtaatgaagaagcccccgcagttattgcgggggcttttctaatattaaaaaccgcgggccgtcatgaacggcgccgcggtttttgatgttttcttatatattccaccagtggagaccgtctttttcaagaagatcgtccgaagctttcggtcccattgacccggcttcataattcggagaaagggttttgtcggctgcccacgtttcggaaatcgcatcgacgaaattccatgaaagcgccacttcgtcccaatgggcaaagtttgtcgcatcaccgagcagacagtcatggattaatttttcataggcttccggtgtgttcatttcatcactgcagttgctgcagtagtccagcttaatcggctgagcatgtgcggctccgcctaattttttagcgttcagatatagtgtgatgccttcatccggctgaatatggatgacaagcaggttcggatttacattcgtttcattgccgtaataaaggttcatcggaatgtctttaaattgaacgacgattttcgttgatttttctttcatccgtttccctgtgcggatataaaacggaacgccggcccagcggaagttatcgattaacagctttccggacacgaatgtttccgtattggaatccggtgctacattttgctcatctgtatagctcggtacagcgtttccgtcaatcgttcccgcttggtattgtccgcggacgaagaagtcacttacttcgtttggagcgacagggcggagggctctcagcaccttcactttttcgctgcggatttcttccgtgttcagtttaatcggcggttccatcgccaagagagcgaccatttgtaaaatatggttttgaaccatatcacggagtgcgcctgatttctcataatatctcgcacgatcctcaacgccgagatcctcacttgacgtaatctggatgtttgagatgtagcggttattccacagcggctcaaacagcgcattcgcaaaccggatgacttcgatattttgaaccatttgtttgcctaagtaatggtcgatccggtaaatttgatcttccgtgaaagcttcgcgtatttctttgttaagctctttcgcactcggcaggtcatggccgaacggtttttcaatgacgagacgtgaccagccatttgtcgctgtgacaccttcgtttttaagtgattttgcgatagtgccgaaaaactcaggagccatcgccaagtaaaacattctgttgttcgggatttcatatgtatgttcaagctgatcaagcaggacattcagctcctgataggaacccggattcgttacatcaaacggatggtaataaaaatgagatgtgaaatcgtctatgtctttttgcccggcagaagaaacagacgttttaacggtttcccggaggtcctcgtttgaccaaggtcttcttccaacacctacaactgcaaactcttcaccaatttgaccatttttatataaacggtgaatggatgggtaaagttttcgttttgccaaatcccctgtggcaccaaatattacaattactgcttttggtttgtcgtttgttttcacttagagtacctcactttatctgaagcatggtttaaaaccccgcatatttccttcattttaaatctaaaattcgttgaaagcaaacatttcagcctgttttttgcggtttgcggaaaaaaattaatcaggccggagaaggcccgggtgaattcacattttcagcctgatcctgtatccttagtagtacaaagatctaggaggaagcattgtggaattattatttttagggacgggggccggcatgccggcaaagacgagaaacgtaacgtccgtcgcgctgaagcttcttgaagaaaggcgttccgtatggctgtttgattgtggagaagccactcagcatcagatattacatacaacaatcaaaccgaggaaaattgagaagattttcatcacccaccttcacggcgaccatgtttacggtcttccgggtctgttggggagccgttcatttcagggcggtgaagaagagctgacgatttacgggccaaaaggcattaaagcctttatcgaaacaagcctgaacgtgacggcgactcatctgacgtatcctcttaccgtacttgaaatcgaagaggggacggtttttgaagatgagcaattcattgttaccgcagcatccgtcattcacggcgtggaagcgttcggctaccgggttcaggaaaaggatattcccggcgcattgcaggccggcagattaaaagaaatgaatatcccgcccggacccgtctatcagaaaatcaaaaacggcgaaacggtcacacttgacgatggcagaatcattaacgggcgggattttttggaacccccgaaaaaagggagaatcgtcgctttttccggggatacgagggtatcagagcgggtaacggagctggcgcgcaatgcggatgtgcttgttcatgaagcgacatttgccaaggaagatgcaaagctcgcacataattattatcacgcgacgacagaacaggctgcgcaaacggcaaaaaaagcaggcgccaaacagctgatcttaactcatatcagcgcaaggtatcagggtgaatcgccgatagagcgtctcgaacatgaggcgaaagcggtatttgaaaacagtaagatcgcatttgacttcatggaggtcactgtggagcggtcttaaaaaatggacgcttgacatttttttctggtgagatataataaaacgtaataattacgatttgcacaaggggtgaaaatgatgcgtgtgaatgttacattggcctgtacagagacaggggacagaaattatattacgacgaagaacaaacggacgaatccggaccggttagaaatgaaaaagtattccccccggttgaaaaagtatacgttgcatcgtgagacaaaatagatcacgataacaaaagccattgtgccgttgcacaatggcttttgttttatcagtttaccgcctgataggcaggagcattcatttgctggcgcaccgcgcaccaaacatcataaatggcaaggtggacgatgtgcggttcatcgtggtgaatggcatgagaactgtttttggcctgaatccatccgctttgataagagacatcaagcatgcttctgtgcagtttcacccattgttcatgagcgtgctttaaacgctcatcccgctctcccgatgataaaatcaacagcggcatatcgccgaaatgaatctgctgatgcttgatctgacgaaggctcgtcaaaaattccgcgtgtgatccttccaatatgaactgtttcaaataggcggctttcatttcttcgggaagaagcggaagcactttcgtctcctgatcctcagaaaccggatcaagcatcaccatcccgagaatatcccggcggttccggctcgcccaaagtctgctgataatcgcgccgtatgaatgcgagacgacaagataaggaggcttgacgccggccttcagaagaagagcgtttaattcctgtaccatgtggtccgccgttctcttgtttcggctttgtccgcttttgccgattccggctctgtcatatgtgaaaaccccaaattcttcatctatgtcagcgagtaatgatgtccatgtttcagaagaagtgccgtagccggcttcaaagacgatcgtcacttcgccggcgcctttacggtgtttcgtataaaacggacacccgtcaatcagatatgtcctttccatccatgctgctttcattggagtcatcccctctaattggttctatagggaagacggagaagcttcggcaatcgtttctcaaaaaataaaaaaagagacagccggatcgaaaaactccggctgtcatttcatcaccatgctctgtcgtattgaaccggtgacggtatttcagtattcagctgcttcgctgcactccttgcaaagtgcggatcgcgcagaagttctcttgcgacaaaaataaggtcagcgcggttgttttgcagaatttcttccgccattgttcccgtcgttatcaaaccgacggcgcctgttgcgatttcggcctgttcacggattttctctgcgaagctcacttggtagcctgggaagacattaatatcagcttgaacgagtgcgcctgagctgcaatcaatgaggtcgactccctgttctttcatccacttcgcaaaaccgatatgatccgcaatgtccagccctttgtctgtataatccgatgcagaaatacggacaaataacgggccgtcccagacttccttgacggcttcaatggtctcgcctaagaagcggtagcgattttcatgtgagcctccgtattcgtctgtacggtgattggacagaggggacaaaaattcgtgcattaagtagccgtgtgccgcatgaagttcaataatgtcaaagccggcttctttcgcgcgcgccgctgcctgtttgaattcctgaatggtttctttaatttgttctgtcgtcatttcagccggtgttttggactgctcatcgaacggaatggctgacggagcgtaaatgtctccctcaagctcagctttacgtccggcgtgcgcaagctgaatgccgattttagatccttgcgctttcacttgttccgtcagtttggcaaaaccttcgatatgatcatcgctccaaatgcccaaatcctgatcggaaatgcgcccctgaggattaacggctgtcgcttccacgataatcaggccgacctgtccgattgcacgcgatatgtagtgcgccatatgaaaaggctgcagttttccgtccttctcatgtgaggaatacatgcacatcggtgccataacaatacggtttttgatcgttacatctttaacggtccatggtgtgaataattttctggccatttatttcgcctcccggaatgtttttagacattgattataacaactcatgatcattcagtcatataaactgctcacgactgagcgcattgttattattgttctggacgggcatttttttatacacagcgtagccgtatcttcataacaggcatttacagccgatcatatagcaaatatagatgagaaacgcaccgatgactgcgtggccacctttgaaccagtttgtcaggatgaaaatactgctgatgaagatcactgcgccgaaggcaccgaatattccgtttttttgagcggctctgaaatcgtcggggctcatatttttcagctgcaagtgaatattcagtaacgtcatgatcggcagcaatgtaataacgcctgataagaataagtatttcgatttgcttaaatacgcggcggccaccataacggtgccgccgataaaaaattgaatgagaaaacccatgctgaaacgctcaccttctgtttgttatcaagtataatgatggagacattgccattttatttttgattgatgtataagtaaactaaatataactaatgcattggataataaagaatgatatctgggagatgaagccggttggatttaaagaagcatttagcctttattaaaacggttgaaagcggcagcctgacccaagccgctgccatattgaattacacacagccgaacatcagccaaatgatcagtaaattagaggaagagtacggttttccgcttttgatcagacagcggcatggagtgaggcccaccgcaaatggcttgaaagtgttacatattatgaaggaaattcaaaaaaactatgaaaaactgtctgaaaccgttgataatattaatgggttagaaagaggggaagtccggctcggcactgttacgagcgtggcggtaaaatggctgccgaaaattttgagggaatttaatgagctgtatccttccattaaggtgcatttgtttgaaggaaattctactgaactggaagaatggctgaaagatgaccggattgatgcggcgatcggcacatcccacagcgagaggtggcatttttacccgttggccgaggatcagattgtagcggtgatgagcccgcagcatgaattggcgcaatgtgaaacggttccgttacatgtcatggagtccgtcaaatgtatcgtgccttatccggagacacattttgatgtgctgaaagtgctgaaggaagaaaagattacgccgcgggtcgcttatcaaatcagaggggatgaagcgattattgcaatggtgcggaacaatctggggatcagcatcttgccgcagcttttggtgaatgattgtgatgtgctcatcaaacggttcgaccggtatgtctccaggcagctcggcattttgacagctcatgcaaaggagacgcagacaccttctgtccagaaactgattcaatgcatacaagaatgggttgcggtccgtcaggcttctgtctgaagaagcctgatatgcgtttaagccggttcagcataatagaccagcataaaatatgtcaccggttcatccgaggaattaaaataactgtgcggcatcgcccgaagtcagcacatgcttttcgtcatgaagctcaaccgtcaattcaccgctcttgattaaaatgtatcttcccctaaatgtgattttgcctcatgggcgcagcccggctttaggtcaactatgtcaaaaagtctgaccgtgacggtggtgagcggggttattttgatgtcgggctttcgtctgtttatataaaaaaagcatcaacggcacatgctgttgatgctttttttgatatgctagggtttggagagcacttcaattccgacgttgaccattttgtccagtcccataaaagacaggcagattttggcgcgtctttttcttttatcgatctttttaataatgccttccattcctttaagaggccctgaggcaacggttacttttgaattttcaatatagacttttgaataatctacagtgtctccttctccgatcagcctgataatagggaggatttcttcatccttaattgtcgtgaaataggttttacgctctttggaataatatgcgccgttattcacgattctgcatgaaatggggagttctttgattttatgaaatgtccgctctgtcatcttcgttttaaacagaacatatcccggaaacatctttttgagtgcctcgtatttgattccggcttttcgttctgtgacttttttcttgggtatgattgagtagagagcctgctcatcaaactgcagacgcagaaatttttgaactgtttcttcttttccggactctacaaaaagtgcgtaccatttcatgactgggtcctccttagaataataagaaattattatacaaagaaagtatttaatggatagtatttaaagtgattaaaaatttttctaattcgtcttttttttacataatatatgaaaatgaaaaataagtatagacccaattgacagagaagcgatgaattttctttgacatgaatagggttcagggaattatctgacatttatcccgaaacaattatgccgactgtccaccgaacataaaactgtgaaataaatgtcagaaaataatgaaataattccttgacattattatctataaattgatattattctctttaaatagcaactatttgttaaatttattaaattgatgtaaagcacctattaaatttcaatcgctgtttcggcacgttgaagaggaaatagggattataaaaatgattgtagtgtatatatctacatatacatgataagggagaagtgtgccgtcatggctgttttcgggcatattggcactgcagcttgtcatgcgaaacattcagtaaacaagcaagatgtctttatataaattatgttagaaaaggaaaacacaatgcgtttgcgatttttaaacctgtgctgaatcgcaaacgcgtttgtgtttttatttttatgccggtgtttacaccagtcaatatatgaaataagagacgtttttgtatggagaaccacatgtgatgtacaaaattggcgatgcggaaaggatgaggataagatgcttacgtttgtgttcccggggcagggttctcaatttaaaggaatgggagccggactgtttgatgaatttcaagatctgacacgtcaggctgatgacatattaggctactctatagaagaattgtgtctggaggatccgaatcaccagctggggaaaacgcaatttacccagccggcgttatatacggtgagtgcactcagttatttaaagaaaatgaaagagtccggcagagagcctgattacgccgcagggcacagtttaggagaatataatgcgttatttgcggccggctgctttgattttgagaccggtttgcagcttgtgaaaaaaagaggggagctcatgagcaaggcagctcccggaggcatggcggcggttttggggtttaccgctgaacaagtaaaagaggttctatccgattatcatctgaccggcattgatatcgctaaccacaattcaccttcgcaaattgtgatcgccggaacgaaacaagacattgaaaaagcgggccccgtctttgaaaaagccggcgtgagaatgtaccttcctttaaatgtgagcggcgccttccattcccgctatatgaaagatgctgaaaaagagttcgcggattatttagaagaaacggtgtttttgcctcttcgttttccggtgatctcaaatcttcatgccgcaccttataagaatgatgaaatcaaaacaaatctgactttgcaaatgaccaatcaggtaaagtggacggacacgatacgccgtctgatgggacttgaaaataatgaaattgcagaagtcgggcccggagaagtgctgacaaaactgacgcgtcagattaaaaaagatgccgtcccattacctatgccgaaagaagagtctgatactgctgatgttaaagcatcggcagctgatccgcaaaaaacggcgggaatgagattagggaacgaagattttaaaaaagattataacatccaatatgcttacatgacgggctccatgtacaggggaattgcttcggaacagatggtcattaaagcggcaaaagcgggaatgctgggctttttcggaacgggcggattgagtatcgaacggatcggacaggccatcggcaccatccggtctgcactgcggcaaggggaaacattcggaatgaatcttcttcatcatatgatgtcacctgacaaggaagtcagaatgatagatttatatttgaaaaacggcattcatcttattgaagcatcggcatttatgggcataacccccgctcttgttatatacagggcaaagggattaaccaggaatcatgacgggtcggtgtcagttcaaaacaaaatcatcgcgaaagtatcccggcctgaagtcgctgaggcctttctgaatccggctccggctcatgtgctggaaagacttgtgtctgacaatcggctgacagccggggaagcggcgcttgcaaaagaaattccgatggctgatgacatttgcgttgaagcggattcaggagggcataccgaccaagggattccgtatacattaatgcctgctatgatcagactcagagaccgcatgatggagaagcacggttatgcgaaaaaagtaagaatcggcgcagcgggcggcatcggcactccggaagcggctgctgccgcgtttctgctcggcgccgaatttatcggaaccggttctattaatcaatgcacggtcgaagccgggacaagtgattcagtgaaagatctgcttcaggaagcgaacgtgcaggatacgtcatacgctcctgcgggagatatgtttgaagcgggagcaagggtgcaggtgctgaaaaaaggcctgtttttcccggcaagagccaataaactctttgacttgtacagacaatacaattctttagatgaaatagatgaaaaaacgaaaacattaattgaagaaaagtatttccagcgcagttttgaagaagtgtatgagcagttgaaacgtgataaatctcctgagcagatcgccaaagccgaacagaatccgaaacacaaaatggcgatggtatttaaatggtatttttctcatacgacaaggctcgctctggaaggaaaaagcgaaagtaaaatagattaccaaattcattgcggtcctgcgctcggcgcgtttaatcaatgggtgaaaggaaccccgcttgaaaattggagaaacaggcatgtcgatctgatcggcaaacagctcatggaagaaacagccggccttcttgcgcaaaggctggtatcgattacaggctgagtatgaccagccattacattttttctgcggaggacagaccatgctgattgaaaatcatgaattaacgatgagccatgtcgggttagggaatttgaatgagtacgcgctgctgctgttattcggcaacgcacacagtcaccatttaacggacggaacgggattccggcctgatcagatggccgatcaccaagggctgattttgtatccggcttattttatgacacatctcaaagttccttcagatcagcctcttgatcagtaccgattatgggacgaggtttccgtcggagtcgatatctcccggtttggagaaaccatattagaatctgattatttgttcgggccgaaaggagcggtcagctctgataaaagcgagtgggaccggggacggtttccttctatgaaagccaatagtttaattgtcgtcgacgtcacacaaacagaaggttcgacgcgcaaagtctcagcgcctaaggctgaatgcattgcggaactttctaagctagccaagccgccttacgccctgatgcggtcaaagaaaatcagaacggacgccttcggtatgaagccgggcaatctcaaaacagcagaccccgtttcatatcgggttcctgttgatcaggatgctgcgcccggacatgccatggtgtttgcgaaattcagcaagataatggatgcggcggaatttgaatggatgacgcgccggtcgaagccgggttttccggtttcaatcgcgcggcatttatttttgcttgaaagagagacgtattattacggaaattgttttgcagatgaagagcttgatatttatatgacgggacacattgaagagtgcgatcccgactttcacggtgagtccctcggtatgatctcagtggcgaaaatcagctatcagattgaagtctatatgaaaagaaatcatacattgctggccatttccaaggtggataagctgctggcggtgccgacctcttcacaagatcatattccggattataaacgggtcatcagaagtttataaaatgaagaatggagctgaaagcaaatggaacaaaccaaggaaatgaagcagatcatcgctcaaatcattcaggatattcaagaacagcagtcatatcgggccgtcgaagcgggggatgatgtgagagtcatagaggatctgggcttctcatcactggatatcgctcaattagtcgcacagatggagatggaaaccggagtagatcctttttcccaaggagaaacgatttccagcattacaaccgtcggcagcatttgtaatatttatcaaaaatatatggacagtgctcaatcatgaaaacagaaagcaggggagatatcagctgggtgactgataagcttagggaaacgcaagacagtgagtttctcatttttaaagggcagacttttacgtatgatgatttgctgacacgaatcagcttttttcagaaagaacttaaacaaaacggaatacgtgaaggagaatgtgtggcgcttatcggggattattccccgaacgccatttttttgctgatggcgcttttgttaaaccgaaatatcgttgtccctctcagcaatgaatcaagggaaaagcatctcgatatgtttgaagacgcgaaagtgaatcaaatcattgaaataaatgaaaatgacagctggacgcttcgtgaaggttctgaaagcgcctctcaccctctgcttgatgacctgcgcgagagagaggagtcaggcattattattttcacatcgggaacttccggcaaaagcaaagcatccgtgttaagcgccggccggctgcttgaaaaatataaaacggcgaagagaaaaccgctgcgtacgctcatttttctgaaattggatcatatcggcggcattaatacgctgtttgcgattctgtttaacgggggaaccatcgtcacatcagacagcagaacgccggagtccgtttatcaggcggtcgacaagcatgctgtccaagtgctccccgccaccccgacctttttaaacatgctgctgatgtccaaggcggatgccggctataacctctcttcactccggctgatcacttacggcacagaaccgatgccccaatcaacgctgcgcggcattcaccggctgtttccggatgtacggctgaaacaaacatacggattaactgaactgggtatattctcaacgaaatcaaaagacagccaatccacttggatgaaagtaggaggtgccggaacagagaccaaaattaccggaggcacgctttgggtccgttctgagtccgcgatgctcggctatttaaacgcaccgtcacctttcgatgaagacggctggtatgacaccggtgaccaggtggaaacagacggcgaatatataagaatccttggaagaaagagtgaaatcattaatgtgggcggagagaaagtgtttccggcagaggtggaaagcgtctttctggagataccgaatgtccgggatgttctcataacaggcagaaaaaatccgattacaggcgagattgtcgcggcagaggccgtgctcgaaaaagaagaagatatcaaatctttcagaaagcgggccgtagctcattgcaaacagaagctgcagccatatcagataccgcagatcatctctgttacagatcggaaactgtctaatgatcgatttaaaaaaataagaaacgtgtaaaacaggaggcaaatatgaataacggaaaagtagcggtcgtcagcggaggaagccgggggctgggaaaagcgattgtacagacgcttttggatgaggattacatagtagccgctttcagccgcagtgaatctgattttattaacacattgagagagagtgaaaagtaccgcggccgcttttattgggaagcggcggatgcggcggatgatgccgccatgaaacagtttgttcttcaagtataccgcaagttttccagaatagacggcttggtcaataacgccggtttgaaccttgatcagctgctgcccctgaccaatgatgaagacattgaccgcatcctcaatctgaatatcggctcagtcatcaagctgacccggaacgtttcccgtgtcatgctgaaacaaaattccggatcaatcgttaacataagctccattatcggctcaagaggatttaaaggcacttcagtctacagtgcatccaaagcggctcttgacggcttgacgcgaagcctggccagggagctcgggtctaaaggaatccgtgtcaattcacttgcgcccggttttgtggacaccgatatgacgaaaaatatgccggaaaaacaaaaatcgcagattatcagaaggacgccgatgggacgtttaggtgaaacagacgatatgaccggactcgttcgtttcctgctttctcctgaatcgtcctttatgaccggacagacaatggcaatagacggcggattaacttgttaaagcacagaaaaattcttttgtacaagggatggtatcctcatgaaatgtattaacgaatttttaagaacggtaatagcgcaaaagctgggtgccgaggtgaccgaagcggaagataaaaccgctttttttactcttggcgtgacgtctctcatcagtgaagaaatcatgaccatattgcataaagaatttaccggcctttctgaaacgctgctgtttgaatatccgaacattgagaaattgagtgagtttttaagtgcgcagaaacgaaatcccgaaagcgttcttgaattcacagaaacggagcctgataagggaagccggcaggaagaagaattgcttcccgtacaggcggctgaaaaggtgcctgaaccggcaacggacgggagctctgatattgcggttatcggaatgagcgggatgtttccgaaagcggaaaaccagcatgatttttggaacaatttaatggaaaataaagattgtgtcactgaaatcccagaggacagatgggacagctcttattactcggaagagaaaacggcagaatacgcttcatacagtaaatggggaggttttattgatcatccggatcaatttgacccgctgtttttttctgtttccccgtgggaagctgatttaatggatcctcagcaaaaattgtatgtcacgtgctgctgggaagcgatggaggatgccggttacgggaatccggcggcgaggccgacggatcaaatcggtgtattcgccggagtgacctggaatgaatattcattaattgcacacgaagaaggtttcctcaaagatcagtacaaaggccccggctccttatattggggcattccgaaccgggtttcttatttccttgatctccatggcccgagcatcgctgttgatacggcgtgttcttcatcgcttgtcgccgtccatcaggcttgtcaggccattatgtcgggcgactgtgaaatggcgctggccggaggcgtcaacctcagcttacatccgcaaaaatacatgtttttaagccaatcgcattttctgtcttctgaaggaaaatgccgcagtttcggtgaaggcggagacggttacgtgcccggcgaaggcgcgggagccgttttgttaaaaccattgaaaaaagcgattgcggacaaagaccacatctacggtgtcattaaggggtccgccactaatcacggcggcaaaatgaccgggtatacggtgccgaatccggaagcgcaccgggacctgattttatccgctctaaacagagccgcggtaagtccggcggatatcagctacattgaagctcacggaaccggcacggcactcggcgatccgattgagatacgcggcctgtctatggcatttgataaacagaccgatgagaaaaactactgcggaatcggctcggtgaaatccaatatcggacatttggaagcggctgcagggatcgccggtttaatcaaggtgcttttaagcatgaaacatgaaacgcttcccgccagtctgcactccgaggaactgaaccgcaagatttctttttctgattcgccattttatgtcgtccgaaacaaccggccgtggccggctgaaggagataaaccgagaatcgccgcaatcagttcattcggcgcaggaggctctaatgcccatctgatcgtaggtgcttatcagccaaaacggcaagcggacaagaatactgagcaaaaaccgcatgccgtcgtattaagcgcacattccgaacagcagctgaaagaatatgccgggaaattgagctcctttcttgcccgtttggaaaacctgccttctgccggcggatacagtctggaaaatatcgctgccaccttattgtcaggcagagagcctttctccttccggcttgctgtcattgcatcatccctttctgagctgaaacagcgattggacggatttgtaagcggtcacagcgacggcaggtatatgtacttcggaaaagcgtcacacgggcggccggacgtttcaggccaatccgtttcagatcctgagaaatttgccgcgctgtgggtgaaaggccttcaaggttgcaaaaagccggaaacgccgtatcagaaagttccgcttcctacgtatccgtttttaaaggaaacgtcctggctgaccgatcaaaaaaagcggtatacaaaaaagccccaaaatatcaaaaagcgtgaagcgctgcatcctctgcttgatgagaatatttcatccgcccggaaagggacgtttcaaaagatattttccaaggatgaatatttctttaaagatcatttagtgaacgaaaaatatgtgcttcccggagtctgtcatctggaaatggcggcatacggcgcgggattgtggggagaacgcccggtcgtctctcttcaaagtgtgtggtacatggagccgattgtgacagggacagacccaagatccgtcatgatagagtttgaagcagaaaaagagcgtataagctatgtcattaaagaaaaaggagcggacggcaccctcttttcgcaaggagaagtgatttgtaaagaaaaagggacgtctttagaggccccggcctttcagctcccggcgccatttgcgcagagaacggagccggaagacatctatcactcgttctctgaggcgggaatcgtgcaaaaggacagttttcaggtcatccgcgaattctcttatacagaaaggaaagcactggccaaattaacgctcccgtcacacttggaagccgattttaaacagtacatcctacatccgtccttaatggatggcgctgttcaaactgcaatggcgcatgtgctgcaatttcaaaaagagcctgcgcttatcgtaccgttttccttcggagaaatacagctgcttgaaccgttagcgaaaaccgtatttgtgtatgcggaggtaaaagcggcctccgttcaccaatttgatctgcatatttgtgatgagcgcggcgtgctgttggcggcagtgaaagattttatcataaaagaggtgcaggaaagcgccggctttaaccaaaaagccggcgtcacgccgaagaaaagccgtgaaacggaattgcttatgacaccggtttggaacaccgtcaccattccggaaaccggcatgtctttcatgcgtgaagaaaaaataatcgtcatcggggccgggccggattttcagcagactttgaaagagatgtattccgatgtccgttttccggtcatcacttctttggacagcgcggaacaaatggctgaaacattgaaagcgcaaggctcttttcaacacatgatatgggcggcgccggatcatcccattccatccgtttatgatgcggatacggccgagggacaggagcacggggtcatgcagcttttccggctggtaaaagcgcttctgcttctgaattttgacatggaacaactatcattgacaatctgcacgtttcaagcacagccgattcatgaacatgatgaggtcaatccgagtcatgcaagcatacacggattagcggggtcgctcgcaaaagaatacaccaattggagcatccggcttcttgatttggaatctcaaaggggagaccggcatctccccgatgtcttctctttaccggcggactccgagggaaatccgtgggtatttcgtgcaggtcagtggcaccgccagcaattggccgtctgccagcctcatgcagatgagccttcattataccggcacggcggggtttatgtgattatcggcggagcaggcggaataggagaagtatggactgaatatatgattcagacctatcaggcgaaaattgtctggatcgggaggcggaaaaaagatacacagattgaaagaaagctgaaaagacttgcggctttaggccctgcaccgcaatatttcagcgcggatgctgccgattatgactctctcaaacgggcgtatgacaccattgtaaaggaaaatggaaaggtccgcggaatcatccattccgccatcgtgttatcagaccgaagttttgccaatatggaagaggatcagttccgcgcgtcactttctgcaaaaactgatgtgagcttgcagattgcccgggtagctgaaggggaacccctggatttcttgctgtttttctcttcgatgatgtcgtttcaaaaagcgccgggacagagcaattatgccgccgggtgcacgtttaaagacgcttttgctaagcggatctcacagaaagcgccgtatgccgtaaaagttgtcaattggggcttttggggaagtgtcggcgttgtcgcttcagaacaataccggaaacggatggagcgggccggaatcgcttctattgaggcgcccgaagcgatgaaaacgctggaaaccctgctttccggacctcatgaccagctggcgctgatcaaaacgacagatccggtttttatgaaagacgatctgaaagaacaagtaacggtttatccggaaaagattccttccgcactcggacaattaacggttaacatcacgcagaatgacgaagctgagcggttaaaagcatcaagtgtcatgagctgcatgagagagatggagtcccttattgaaaaaatgcttgtatcaaccctttatgagatgggagccgggcttggtcaggctttgccgttatttcaatcggctgccggcataacggaacaatacagcagatggctgaaagagagctttgtcctcctgaataaattagcgcttactccggaaaaaacggatctagggcaggtgtgggaggaatgggagcggaaaaaagagacttggctgcgccagaaagacatgagggcgcatgtcagattggcagaagagacattgcgtgtgcttccagacattttaaccggtaagcttccggcaacggaagtgatgttccctgactcctctttccgtcttgtggaaggcatttaccgcaataatatcatttctgattttttcaatgacaagcttgctgacacattgattgcagttttgaaggaacgtctggaaaaagacccgcaggcgaaaatccgcattttagaaatcggagccggaacgggcgggacgagcgccgcggtcatgagaaaattgaaaccgtatgaagcgcatattgccgaatattgtttcacggatatttctaaagcatttcttttacatgcagaagacatattcggtccggaatatccttatgtcacttataaaatattcaacgctgagcagccggtatcaacagaagcgccggacatcggcacgtatgacgcagtgatcgcgaccaatgtgcttcatgcgacaaaaaatatccgctctacgctgcgccatgcgaaagcaatgctgcaaaaaaacggccagctgtttataaatgagatcaacagccgtaccatattcaaccatgtgacgttcggccttcttgaaggctggtggctgtatgaggatcatgatttacggattccgggctgtccgggggttaatccggccggctgggcggaagcgctttcgcttgaaggattcgtccatcctctgtttccggctgaagccgcacacgacttaggccagcagattatagcggctgaaagtgacggaacggtcaggcttgccctcacgcaggcgtcagaagagaagccggagcgccgtccgtatgacgcagaaggtctttcggatgatactttgcatgtcagcctgagagaaaaaagcgttgaactgatgaagaaggtaatcggtgaagcgcttaaagtgccggcgcatcgtcttttatcccatgaacctttaaccgcatacggattggattccatactggtcgtcagactgaccaatgcgttaaaagacgtcttcggttctgtcagcagcactttattttttgaatatcaaaccattgatgagcttgctgattactttctgtcttcccgtaaagaagcgctcgagcggcaattcgggaatggacgggctcatcccgaaaacgccggacgggtgcaggctcccgcagaaagcgccacgccgattccaaacgtaagagaacggggcatcgcatatctgacggaattaataggaaaaacgttgaagattccgagcgggagaatggatccgtcggtttccttaaccgcatacggtttggattctattctggtcgtcaggctcacgaatgcttttcgtaacgtgtttgaccaaatgaccagcaccctcttttttgaatatcagacgatagaagaaatcgcggattacctgcttctttctcagcggggagcatttatgaaagcgatgggtgtgcgtgaagagcagctgtctgatcacacagataacctgaatgtaaaacaaaacaaaattcctcaaaacgaggaaggcagcaggacgaacggagatccctatatccgggatatcgctgtcatcggtctgtcaggccggtatccgggcgccgatcacgttgatgagctgtgggaaaatgtaaaagccggcaggcattctattactgaagtgccgaaagatcgctgggactggaaaacgttttataacgaggaacgcggaaaatgggggtccatttattcaaaatggggcggttttctcgatgacattgataaatttgatccgctgtttttccgtatatctcccgcggaagctgaaaggatggatccgcaggaaaggttgtttctgcagactgcttattcaagcattgaagatgcggggtacaccccggccaccctttgtgacagccggaaaatcggagtctttgtcggtgtgatgaacagcaattacccgacagttcccagcgactggtctatcgcaaacagagtatcgtttttgttcaatttccaagggccgagtatggctgtggatacagcatgctcttcttctttaacagctgtccatctcgccgcagaaagcctgcggagcggaatgagtgaaacagcgattgccggcggagtcaatcttatcgttgatccggcccactatgagcggctgtccgctttttcaatgctgtctcccggtgataaatgcaaatctttcggagacagtgcggacggttttgttgacggtgaaggagtaggggcgattgtgttaaagccgcttgctcaagcggagaaagacggcgatcatatttacggcgttattaaaggaagcatgctgaacgcagcaggcaggacaaacgcttatatggtgccgaatccgaaagcgcagtttgatctgatcgcagagacgttgaaacggacagacattcacccgagaacggtcagttacttggaagcccacggaacgggcactgcgctcggtgatccgattgaaatcgacgggttaacgaaagcttttcgcctgacaacagaagaccggcagttttgttccatcggttcaattaaatcaaatatcggacatttagaaagcgctgccgggattgcggggatcaccaaactgcttctgcaattgaaacataagaggattgccccttcattgcatgcggcggaattgaatccgaatattgagtttgagcacactccgtttttcgtacagcaaaaagaaacggaatggaagcgacctgtcttgaatatcacgggtgaaatgaaggaatatccaagaattgccggcatttcctcgtttggagcaggaggttcaaacgcgcatgtcatcattcaggaatttgtgccgtctgacagcctgaaaccaatggaaaacgcgtctgtttctccgcaaaaaccggctgttattattttatcagctcgaaatgagcagcaattgacagagcgcgcccgccagcttctggatgatgtcataggaaaaaaacgttctgacggggatttagccaagatcgcttacacgcttcagacgggaagagaaccgatggctgagcggcttgcatttacggccgagtcgatagaagaactgaaaatgaagcttatgagtttctcaaacgatcataatatcgaacatgctcatatctggcggggcaggacagccaaacatcattcattggcggcttcactcacttctgatgaagatatggcgcttaccataaatgcctggctgagaaaagggaaatacggaaagctgcttgacctttgggttaaaggacttgacgtcgattggtcagctctttatcagcgcaacccgggccgcatcagtctcccggcctacccttttgccaaagaccgatattgggtcacaaaagctgatgtgtcacttgacaaaacaggctcagcgaaaagtgagaaagcagccagacttcacccgctgctccacacgaatacatcgacctttaccgcccagcgttttacttctgttttttcaggatatgaaccgttttttgccgatcacatcgtcaatggaaaaccggtgcttccgggcgcggctgctttagaaatggcccgggccgccgttacgctggctgctgaagacttgcccggcgggaaaacgggtgtaaggctcaaacagatcgtttggctccgtccggtgacggcgctttctgaaggagtgacgcttcatgtaaagcttcagccggaagaaaacggagacatcgcttttgaagcgtatgccgaaggagaagagccgcttgtctttttccagggaaaggccgtgctcgaagagacggaacgtgctcctgttctcgatgtagaagctgtggccgatcaccctctcaggtcggctacgcatcgtcgccttggtgagccgttacctcaccaactagctaatgcgccgcgggtccatctgtaagtggtagccgaagccaccttttatgtctgaaccatgcggttcagacaaccatccggtattagccccggtttcccggagttatcccagtcttacaggcaggttacccacgtgttactcacccgtccgccgctaacatcagggagcaagctcccatctgtccgctcgacttgcatgtattaggcacgccgccagcgttcgtcctgagccaggatcaaactctccgataaagtagtttgactgactacgcacatcgctgtgcgatttatttaaaactttgaattaacaggtacgttttgtcttgtttagttttcaaagatcattaccgcttgttgaagcagctttattatcttaccactcagcttcttttatgtcaacaacttttttcaagttgtttccgaagctttttgttgttgtctgctgttcatcagcgacgtttaataatataccatgcattcgatgaatttagcaagtgtttttttcgttttttttaaaacgtatttcgttatattcatctccgccgcggcatacgatgtaatcaagcatggacaagataaggaggcgtcatcagtgaatcacttctacgtgtggcacatcagaaggataaaacagctgcttattattatcattgccgcatttgcagcagccagctttttttatatacagagagccgtcccccttcctgtatttttaactgatagcggcccgaaggctatttcaaaaggggagacgaaagcgggcgaagtcgcattaacattcgatatcagctggggcgacgaaaaggcggttcctattctgaacgcgctaaaagcaaacggtattaaaaacgccactttttttctgtcagcttcttgggcggaacggcacccggacacagttgaacgtatggtaaaagacggacatcaaatcggcagcatgggatatgcgtataagaattataccaacctagaggacaatgaaataaaaaaagatatcctccgggcccagaccgcatttaaaaagctgggtgtgaagaatgttcatttactccgcccgccgaccggacaatttaataaaaaggttcttaccattgcacagcagtaccactattcagtggttcattacagcgttaactcgcaggattggacaaatcccggtcctgataaaatcattgaaaatgtaaacagtcatataaaaggcggcgacattgtcctgctgcacgcctctgattcagcaacacagactgaagaagcgctccccgccattattcacaatttaaagcaaaaaggactgaaaaacgtgaccgtcggcgacctgatcgcaaatactgacgtcaagtcatcagaagtgaaataactacctctgggcaaacttcggcagcattaacagctgaaacgcattgcagcccatcagcggaatcagcatcaaataaagccagtcctcattattcactcgtagcgcaggaacccattcaagcgctgtaataacgaccattaaaaataatgatgaaacgaacgtattttttgaggactgcttttgttttatatatgccgtcaacaggccgacggcaagcagagccagcggcagccagacaaaccctgcaatcgagtcatcccgctctccgaaaaacaaaaatctgacgtacattaaatcaaaagcgacaaacagaatgataaacagctgaagcagattccaaagcgagcttgatctgagaatttcaagggcaaaccggtgcaccgtcagaaaaacgaagaatcccatctggctgatcacactgaaaatcatgcctaccccgataaaccagatcagaacggagaaaatctgaccggcctcaaaattcagaaagaaccccttgtactccccccacttcagagcaaatcccacgacgcttgtaataagagcgcccacagctaaaatcgaaaagaaaaatcgaacaagcccgcggcttttcatctcttattcatccccctgacaatcgcgttcagcgatattttgttatgtataaatccattccgatgaatcatattaaaaataagtacaagtaaggaaggagcttatgcatgtcaaaagccaaaacgctattgataagctgttttgttttattatctgtaacagcttgtgctccaaaagaccaagcagcggatatggattatgaccagactaaaaaaatggttgttgatatattaaagaccgatgatggaaaaaaggcaattaaggaaatattaaatgatgatgcgatgaatgaggcattggtgattgatcaaaatgccattaaaggcacaatagagaaaaccctcacctctaaaaaaggggcggagttctggaaaaccatctttgaagactcaaaattcgccgagagctttgcaaaaactcttcagcccgagcatgaaaaaatcataaaaaaactgatgaaagaccctgattatcagaaaagttttatgcagatcatgcaggaccccgggatggataaaaaatactatgagctggtgaaaagccaaaagttccgcagttacttagaggatgtaattacagagacactttccagcccgcttttcaaaaagcaattcgaggatgaattgaaaaaagcagcttcaagctctgaaaaagaaagccaataaaaggccgggccgtgttgatcccggccccttttttattcagctgttttttcaatgactttctgggcgatccccatataaatttccccgatcggatgacttctgtcatagacagaaggcgcaaactgatccttgtcccaatcaggctgttttaaaggaattctgccaagcagcggcacttgcaattcctccgcaagcttatctcccccgccttgaccgaacacatattctctctcgccggtttttgcactttcatagtaagccatattttcaatgacccctacaacttcatgatcggtcttaatcgccatagaacccgctctcgccgctacaaatgcggctgtagggtgcggcgttgatacgataatctctttgcagctcggaagcatcgtgtgtacatcgagcgccacatcacccgtgccgggcggcagatcaagaacgatatagtcaacctctccccagtcaacttcatggaagaagttattcagcatcttgcccagcatcggccctctccacacaaccggagcgttttcttcgacgaaaaagcccatcgacataacctttactccaaatctttcgacaggaagcagtttttctccttctactgtcgggcgaactgtaatacccatcatgtccggcacgctgaatccgtatatatccgcgtcgatcaagccgactttttttccgagccgcgcaagagaaatggccaggttgacggaaaccgttgatttgccgacaccgccttttccgcttgccaccgcaagaaagaccggcggatgtttcctattcagcagggtttcgctttcagcagccggccggctgaatttcgccaatgtttcttccggcagctcttcaaaccgcagtcccacagtttccgcacccgcttctttcagaacggatacgatttcctgctgaatacccatctgttcagccgtccccgtttttgccaatgcaattttcacactgacatgccgtttttccggcttgatctttacttctttaatggcatccaattctcccagcggtctatgaagaaaaggttcgcgcatgtttccgactatatttcttacttcatcttctcttatcatcgaaccctcaccctttgtgtattcgtttacaaatggtattataccatatattaaacatagaatcggcgaaaaaccctccttactcgggagggtctcctttctctgtgaagtatctcaatacgcccttatacacggaagaagcgattttgtcctgatatttgggctggccgagccttttcgcttccgcgggattggacagaaaaccgatttccaccagcgcgcccggtttggttacattctgcattaagtaaatgccgtgtatccgtttcgcctttctcgttgtattctccaaattgattctcaattcgtcctgtatatattttgccactttttcattttcttcgtattttccatagtagaagctttgggcgccgctccatctcggtgacggtatggcgttcagatgaatgctgatataaagctccgcctctgaacggttgatgatttccacgcgctttctcagatcttccgctttgcgtctgctgtagccttttgtcccttcaggagctaaatcagtatccgtctcccgcgtcataatgaccaaagctccctgctcctgcaaatagtctcttaccctggaggccacttcgagagtaatgtccttttcaaggtgactgcctcccgtggcgcctccgtccggcccgccgtgtcccggatcgagatagatgattttcccgctcagcggcagactccacggccgccaggaatcatcattatggaattgaaaccggaataaacacaataatatgataaagccaagtaaaaaaccgagccatttcagcttttttgtcatacctttccctcccgcttgtccccgttattaataagtatgggacaagggaagaaattatgattacctcatgcggagcttacattgtttttctctttgcagaaatccttccgtccaccagctgttgataaaccggcaggacgcttcatagatttctttttgtttaacggaagaatattgctcatgcgtccaattgcaaagatattcaaaaaaatcgaccgtcagttcttcctcttcttcagccgaacgggcgtttgccctctgcaaagactcaccataatagccaaagacgccgaaccggccgcctaataaatacgcttcaattgcaaaatctatgcatccttcactcagaatgccgttttcgtcttgaagaaagggaaacaaaggggtaagacatgcttttacggactgaatgatctgcgtcagtgacagctcctttagtaaactcttctcaagctcaaaatccttctgccgtttcacgtctgaaaaagataatacttctgccattgccagccacgctcctttttactgttattttgaaaggaaaagggaaaaagcatgctttgttgatagtggaaatcctcccaaatgaaggagttttatgttaactggaagaagaaagaactgaggtgacgtgatgaaaaagctgtttcaatacaattggacggtgcgtgacgagtggtttatgatatgtgaaaagctgagccgggaggaactgacgaaaacccggacgggcggaatgaagagcatcttgcggactttatttcatatcattgatgtcgagatcagctgggctcgtgccattttaggtaaagatgatgttttacctgctgagtctgactatacgagcattcaggatctcagaaaactgtctgaacagtatcgggaggatgtcattcatgcggtctccctcaaaggaccggatcttgttaagccgggctggatggaccaaacctttcctaaagaagatattctccgccacatccttgcgcatgagattcaccatatgggacaactgtcggtttgggccagagaaattggagtagaaccggtttcggctaatgtgatcagccgtccgcaggaaaaagccgcaaaaaaacagcacctctgacgggatgccgtttttatattttaatgcttcttgttacggagtatgtattaatgtattcatccagcacgaggccgcctttgtcctcgtaaaaaccggcaaccatgaagcctgcgtcaatctgacctttaatttgatcctccagcgtatggccgaattcaagcgcttcatgattatcaataagttcctttacctttttcttactcagatctttttcatccgaaaacggaatggaatactttacttttagtacgccttcctgctctaaatccatatcaaataagaacacgacgggatttacaaaaccggagactaaagacccgccttttttcaatacgcgatgagcttctttccataccggaagaaccgtatcaacaaagcaattcgataccgggtgcacgataaaatcaaatgactcatcatcaaaacagctcagatcattcatgctgcctttgacagtccgaagcgtaagatcgtcccgctcggcaaccattctgtcttgcgcaagctgtttttccgaattgtcaaagatggtcacgtccgctcctgcagcagcaaggaccggcccttgctgtcctcctcctgaagcgagacaaagaaccttcagaccgtctatgggcggaaaccaatccgccggcacatcttttccgggggtcattctgatgctccaattgccttttttcgcttcaccaatcgtatgagaatcaaccgcaaccgtccattcattgcctgtttcgacttttttatcccatgccttgctgttatgtatgactaacttattcattataactgcgctccttattggtaatgaatagagtataacaaacaattctagaaaaacatcggataacctcttgaatatgagaaaaaaatacaaaaaaaccacaaccaagaagttgtggtttttgccatccaaaacgattaacgttttgagaactgaggtgcacgacgagcgcctttaagaccgtattttttacgttctttcatacgagcgtcacgagtcagaagaccagcacgtttaagtgttgcacggtattctggatctgcttcaagcaaagcacgagcgataccatgacggattgctccagcttgaccagataagccgcctccatgtacgtttactaaaacatcataagtaccagctgtttcagttaaagttaatggttgtttgatatcttcgattagagctggagatggaatgtgctcgctgatttcacgattattaacgacgatacgaccttcacctggaactaagcgcacacgcgctacagaacttttacgacggccagtaccgtaatattgaacctgtgccaaattggtaacctcctttttaattaaccgcgaagttcgtagacttcaggtttttgtgcttcatgtggatgctcagaaccacggtatacgttcaatttcttgaacatttgacgacctagagaaccttttggaagcatgcctttgatagcaagctcaagcattttctcagggtagtttgtacgcatttcaagagcagttcttgattttaatccgcctggatgttgagtgtgacggtagtagattttgtcagttaactttttaccagttaactcgattttttcagcgttgatgatgatcacatgatctccagtatcaacgtgcggtgtgtaagtcggtttgtgtttcccgcgaaggatagatgcaacttctgtagaaagacgtcctaaagtcttaccagcagcatcaacaactaaccacttgcgttcaatagtacttgcgttagccataggtgttgtacgcattgaatttccctcctaaatgatctgtcattttcaataatcttcgattacgttctatttcacaacacaataagttccggggcttatcgtggggttgaaatacataccatatgatatcttataactttatgcagactctgtcaagaaaatgttacacctggtttagttgtcatagcaaacgctccataaatacagcccgtgccccggtgcggtgcgccccgcggcttcgcgatctttcgcttcgagcattgcttttacatcatcgggagaaaattttccagctcctgtatccaataacgttccggcaatgattctgaccatattatagagaaaaccgtttccggtgatccgcatctgcaggccgtctccggtctcagtccaatccagctcgtaaatcgttctgactttatcctgaaccgcggtatcagccgcgcaaaagcttgtgaaatcatgtgtcccgacgaggtgccttgaagcttccctcattttctgcacattaagcggatatgcaaaatggtaagcgtaatgtcgtttaaatacgtccgggtgtttctccgtatatacaaagtagcgatattccttttggaccgcgctaaatcgtgcatggaacccatcatccgcaatctctgctgttttgacggcaatatcatcaggcagcagggcattgagcgcaaacggccatttctcagccgggatggacagcggcgtatcaaaatgaatgacctgcccggcagcatgaacgtcgctgtccgtgcggccggatgagtacacaggcactctgccgtccgttttatggatgacagccagcgctttttccaattcactttgaacggtccgttttccaggctgaacctgatatccgttaaataaatgcccgtcataagcaatggtacatttcactctcattcagcagcacctctaacttcttaagaaaaacaataacacggctaataagatgatgagcagaatagctccggtatcctttccggtccagacgagctttctgtatttcgttctcccctcaccgccctggtagcctctcgcctccatggcgaccgcgagctcttccgcgcgtttaaaggcgctgacaaacagcgggacaagcagcggaacaaccgctttgattctgtctttcaccgggccgcttgtaaagtccgcacccctcgccatttgcgccttcatgattttatctgtctcttccatcaatgtcgggataaatcgcaatgatatcgacatcatcaaagcgagttcgtgtacgggcagcttcacctttttaaaaggattcaggagctgctccattccatccgttatttcaatcggcgttgttgtcagcgtcagcagcgtcgtcataaagataaggtaaacgaaacggagagagataaaaatcccctgtataagtccgccctcatacactttaaaccagccaagctgaaaaatgacagatccttcatgcgtcatgaaaatgtgtaataaaaaggtaaacgccacaatccagataatcggcttaagccccttcagcaaaaagctgaacggcacgcgagtcaaggcgatcaccccgaatgtaaacaaaccgagcaaagcgtacgtctgtacgttgtttgccaaaaaaacgatacatacaaaaagaaagatgctgacaagttttgttcgcgggtccaatcggtgaataagcgatgatccgggaacatactttccgataatcatgctgtccatcattggtccttttcctcctgaaagaaagccttaatttcactggcggcatcctgcagggtcagcatgggtttttcatacttgactccgagagccttctcaagccgtctctgaaacttcaccgattcaggaagatccagtcccatttcggccatctcttcaccttttacaaacaagtcacgcggactccccgtcgctttaatggttcctttgtgcatgacgatcatttcgtcagcatagcgggcggcgtcctccatgctgtgggtgacgagaacggtagtcaggtttccccgctgatgaagcgcatagaacatgtccataatgtcctggcgccctctcggatcaagaccggccgtcggttcatccaaaaccagcacttccggctccatcgcgagaacgccggcaatcgccactctgcgcatctggccgccgctgagctcaaatggtgaacgatccaaaatgtcttccggaaggcccacaagccccagcatttcttttgctttccgttcagcgtcttctttttttacaccaaaattcatcggcccgaatgcgatgtccttcagcacagtctcttcaaacagctgatgttcgggaaattggaaaacgattccgactttttttcgcaaagtcttaaggtctttattctttttaccggctgccagaatcgtgctcccgagttcaagctgtcctttagtcggtttcagcaacccgtttaaatgctgcaggagcgtcgatttgcccgaccctgtatgcccgatgacggcaacgtagctgccctcttttatcacggcattgatatcatacagagccagccgttcaaaaggtgtcttcatttgatagcggtgttctacatctttgattttaatgtccacagctcattcaccagcccttcctgagtcagatggtttttcgttaacgccagtccgctttctttcaaaagcaggctgagctggaatgagaaaggcaaatcaagaccgatgcgaaccaagtcttcgtttaatttaaaaatctcttcaggcgtgccctctgcatatttcctgccgccgttcatcacaatgatcctgtccgcccttgcggcttcttccaggtcatgtgttatcgaaatgacggtggccatgccctgatcttttaagcgtctgacagtatcaaggacttcttctctcccaatcgggtcaagcatggatgtcgcttcatccaaaatcataatatcaggacgcgcggcaataattcccgcgatcgccactctttgtttttgacctccggagagatggtgcggctcttgatcaagaaaatcctgcatattgacttgtgtgacagcccaatctactctctcaatcatttcttcgcgcggaacaccattgttttctaaaccaaaagccacatcatcgcgaacagtcgttccgacaaattggttatcgggattctgaaagaccatccctattttttttctcacatcccacacggtatcctcagtcagcttgatgccgccgacttcaatttctccggcctcaggcaaaatcagcccgttcagcgctctggccaaagtcgacttccctgaaccgttgtggcctacgatagcaagccattctccttcgtatacctccagactcacaccgtccagcgccggtctttctgcatctttgcggtagcggaatagaatgtcttttacggatataagctgtttttgatccacgggcgcctgacctcctctcagctatagctctgcttttctgtctcatgataaaaagttctgatatctaaaaaaagggcatagatccagttagaaactgtcccgcccttctttagatacacaaaaatatgtgattaaaccaattcgatgattgccattggtgcaccgtcaccacggcgaggaccaagcttcataatacgtgtgtatccgccttggcgctcctcgtaacgagttgcaatgtcagagaataatttttgaagtgcatcttggttattttcttcattagcaacctcgttgcgaatgtatgcagctgcttgacgacgagcatgcaagtcaccgcgcttaccaagagtgatcatcttttcaacaacagagcgaagttctttcgcacgtgtttcagttgtttcaattctttcgttgatgatcaaatctgttgtaagatcacgaagcatagctttacgctgtgaactcgtacgtcctagttttctgtatgacatgtgatgtcccctcctttaatggaatgctgtttctaaataaaaaacacacgaaaatcctagttcacatggaaactagatcaatcgtctttgcgaaggccgagtccaagttcttctagtttcgctttcacttcttcaagtgatttgcgtcccaggttgcgaactttcatcatatcttcttccgtcttgttcgcaagttcttgaaccgtgttaatgcccgcacgcttcaagcagttgtaagaacggacagaaaggtcaagttcctcaatcgtcatttcaagaactttttctttttgatcctcttctttttcaaccatgatttcagcatgctgagcttcgtcagttaaaccgacgaatatattaaggtgttcagttaaaatctttgaaccgagagcaattgcttccttcggtccagtgcttccgtcagtccaaacatcaagtgtaagtttgtcatagtttgcaacctggcctacacgagtgttttctacctgataagataaacgagaaactggcgtaaagattgaatcgatcggaatcacgccgattggctgatcgtctcttttgttcgaatcagcaggtgtatacccacgtcctctttgtgcagtaaggcgaactcggaaactcgcattctcaccaagagtcgcgatatgaagatccggattaaggatttcaacatcgctgtcgtgtgtaatatcagctgctgtgacagttccttcgccctgtacatcaatttcaagcgtcttctcttcatcagagtagattttcaatgcaagctttttaatgtgcaagattatcgttgtaacatcttccacaacgccttcgattgtcgagaattcgtgcagtacaccatctatctggatcgatgttacagcggcaccagggagtgaggataagaggatacgacgtaaggagttacccagagttgtaccatatccacgctcaagcggctctacgacaaacttaccaaatttggcatcgtcgctgatttcaaccgtttcgatttttggtttttcaatctcgatcattacttaaaaccctccttcaaaacgtcgaaacctcgaatagaatcatatgagattccatccgaaattccccattgtttagtcccgtatgtgctcaggcaacgagtcggtgcattcgtttcataaataactgtatcataacccattattgacagggacacaaaatctatacaaacaaattacacgcggcgacgttttggtggacggcatccattatgaggaacaggagttacgtctctgatagctgtaacttcaagtccggcagcttgtaaagcacggattgcagcttcacggccagaacctggtcctttaacagttacttcaagagttttaagtccgtgttcgattgaacctttagcagctgtttcagcagccatttgcgcagcaaaaggagtagatttacgagaacctctgaatcctagagctccggcacttgaccaagaaagagcattaccatgagtatcagtgatcgtaacgatcgtgttgttgaaagttgaacgaatatgagcgattcctgactcaatattctttttcacgcgacgtttacgcgtgttttgtttacgagcagcagccattgtttaggtacctcccttacttattttttcttgttagctacagtacgacgcggacctttacgagtacgcgcattgtttttagagttttgtccgcgaacaggcaaacctctgcgatggcggattccgcggtagcttccgatttcgatcagacgcttgatgttaagagaaacttcacggcgaaggtcaccttctactttcagtttgtcaataacatcacggattttaccaagttcttcttcagtaagatcacgcacacgagtatcttcagaaacaccagcctctttcaagacttgctgagccgttgtgcggccaattccgaagacatatgttaaagaaataacaacacgtttgtcacgtgggatatctacaccagcaatacgagccattctctgggcacctccttattaattatccttgtttttgtttatgctttggattttcacagatcaccattacttttccttttctgcgaataactttacatttctcgcagattggtttaactgatggtctcactttcatgtgtttccaacctccttcagtttccggagtgctttatttgtaacggtacgtaatcctgccacgagttaagtcatatggagataattctaccgtaactttgtctccaggtaaaatgcgaatgaagtgcatgcggattttaccagatacgtgagccaaaaccgtatggccattttcgagttcaactttgaacatcgcgtttggcagtgtttcgacaatcgtaccttccacttcaattacatcgtctttcgccattcaagtgttctcccttcttcaaatcagtaacttgctctctgacaaatttcaaaagagaaaatctcagttatccgtttgtcacacgccctgtttcgtttatactgttctgaacttccggagatacgcaatcataaagggtgaatgattgatattctttttctaaggagaatgaaatgtacgcttttctccgtctgctttagtacacgatgatgaatcttcattccgatgacagcagctagccggtttttcttccgaccaattgtaaacctacaatctgcccaggtgcggaatgaaaaacatatgtcatggaattcatttcatcatctagacttttgtcagtatatcaaaacccgtttccgtaatcgcaatcgtatgttcaaaatgagcacactttttcccatctaccgttacaaccgtccagttatcagccaatgttttcacatatcggctgccagcgttaaccatcggttctatagcgagaaccataccaggcttcagcctaggtcctttgtttggcggaccgtaatgaggaatttgcggatcctcatgcaagtcttgaccaacaccatgtccgacatactccctaacaactgaaaactgctcattttcgacatacgtttgtattgcgtgggaaatattcgacaaacgttcacctggttttgcttccttcaagcctttatataaagactcctctgttacttccagcagtcgtttatcatcatcactgatgtttcctaccggatatgtccaagcagagtcaccatgataaccatttaatttagcaccgatatcaatgctgataatgtcaccgtcacgcaaaacccttttaccgggtattccgtgaacgagttcttcattaactgatacacagatgctcccgcgaaacccattataccccttaaaagatgggattgcaccctgcttctcaataaaacgttcggcaatttgatccaattcttttgtcgagattcctggtttaatgtgctttttcatctcttcatgagtcaaagccacgattcgccctgcttcccgcatgatgccaagctcacgaggggtcttacagataatcatttgctcaatcctccaagaagctctttcacatctttgtacacgtcgttaatgtcctgctggccattgacgttgacaagataccctttctcagaataaaaatcgagtaaaggctgagtctgcttcatgttgacctcaagccgttttgagacggtttcctcattatcatctgcccgttgataaaggtctcctccgtctttatcacaaacacccggcgttttcggcggattgaaaaccaaatgataggttgtgccgcaaacactgcaaattctgcgtccagtcaaacgttccattaaagagtctttgtctactttaatgttaatgacataatcaatcggcttgccgtattcctcaagaatgttttcaagagcttcagcctgagcgactgttcgcggaaatccgtccagaagaaaacctctttcacaatcatctttgccgagtctttctttgacaatgccgattgtgacttcgtccggtacgagctcgcctttatcaatataagactttgcttcgagtccgagtggtgtttcttctttcatagcagcacggaacatatctcccgttgagatatgaggtatcccataatcctcaacaattcgttctccctgtgtgcctttaccggctccaggaagtcccattaagactaagttcattcggatttcccccgtcctctcttatttagaggaatggttaaaaccagtcctctaatttttcataaatcctcggtaattacgtttcactaactggctctccagctgcttcattgtctccaaggctaccccgacgacaattaacaatgatgttccgccaatctgtgcactttgaggcaatccagcgaattgaatgaaaaagataggaagaatggaaatcacggctaagaatatagaacccacaaacgtaagtcgatacaaaatgctcgtaattctatcttgagtcattttccctggacgaacccccgggatatagccaccctgtttttttaggttatcagccatttgttcagggtttacctgcacaaaagcatagaagtacgtaaaggcgataattaatgcgacataaaccgccatgcccaccggatgtgtattgtcaaagttggcttgaatccactttgtcacattgttttctccgaaaaatgacgcgatagtacgcggcgtaataagaaacgcaaccgcaaagattaccggaataacccctgccggattcactttaagcggaaggtgagttgactggcctccgccaacaggtgaacgaccttgcccttttgcatattgaatcgcgattttgcgtacggcctgctgaatgaaaataacaccaacaataacggccaaaatcgcaatcaccagtaaagcgatttttacaatatgaataaacagctgatcgctgctgccgacaaattgagtctcataaatctgcccaacagttttcggaatactagccacaatccccgcgaagatgatgatcgaaattccgttacctactccattggaagtaatttgttctcccagccacattaaaaaagcagttcctccagtgagtactaaagcaataatcagatatgtcgatatgccggatttttcaatcagcataccgtttgccaggttgttaaacccgtaagacatacctaatgcctggataaaaccaagcacaatcgtaaaatatctcgtgaactgagctaatttacggcggccgacttcaccttgcttagaccactcggtaaacttcggcacaacatccatctgaagcagctgaatgatgattgaagcagtgatgtaaggcgtaattcccatcgcaaaaatggagaactgataaagcgcaccgccgccaaatgtattaaggagatcaaaaacccccatcgaactttgtgtctgcaacgcctgagcatttacatatggcacagggataaatgcacctatgcgaaagacgataagcatgagtaatgtaaaaatgattttattccgaatatcactcacacgcataaagttggagattgtcttaaacaagttagatcacctcagctgtaccgccagcagcttcaacagcttctttcgcagaagcagagaatttattggcttttacagttaattttttctctaatttaccgttgccaagaatctttactcctgcattaagtttgctaataacaccagtctcaagaagaagttcaggagtgacttccgttccttccgcaaaaccgttcaatttgtctacgttcacaatagcgtaatccttacggttgatgtttgtaaaaccgcgtttaggaagacgttggaataaaggcatttgtcccccctcgaatccagggcgtacaccgccgccagaacgagcgttttgacctttgtgacctttaccagctgttttaccgttaccagaaccaataccacgacctacgcgattgcgtactttacgtgaaccttctgaaggctttaattcatgaagtttcattaggacacctccttagcctataatttatttttattgttctttaacagaaactagatgagatactttattaatcataccgcggatcgcagcgttatcttcatgaacgacagtttggtttgttttctttaaaccaagtgttcttacagtaacgcgctgatcttccgggcgaccgattacactgcgtttgagggtaatttctaatttagccattaatgttccctccttatcctaacagttcttctacagattttccacgaagcttcgcaacctcttcagcacgtttaagctcacttaaaccttgaagtgttgcacggatcatgttgatcggtgtgttagaacctaaagacttagaaaggatatcagcaacgccagcaagctcaagtaccgcacgtacagggcctccagcgataactccagtaccttcagaagcaggtttcaacaagatattgcctgcaccgaaacgtccgatgatttcgtgtggaatcgtagttccaaccattggtacttcaatcaaattctttttcgcatcttcaacagctttgcggattgcttcaggtacttcttgtgctttaccagtaccgaaacctacgtgaccgtttttgtcaccgacaacgactagagctgcgaaacggaaacgacgaccacctttaacaactttcgctacgcggttaaccgtaactaagcgttcttctaactctaatttgcttgggtcaatacgacgcataatcatgtgtccctcctttttttattaaaatttcagtccggcttcacgagctgcatcggccagagcttttacacgtccatggtataagtatccgccgcggtcaaatactacgtcagaaacacctttctcagaagcgcgtttcgcaacgagttcaccgactttagcagcagcagcgctgtcaccagtgctttccacgttcaaatctttatcgagagtagaggcactagcaagtgtaacgccatttacatcatcgatgatttgagcataaatgtgtttgtttgaacggaacacattcagacgaggtctttcagctgtgcctgaaagtttagcacgaacacgggcatgtcttttttgacgagcagcatttttgctagttttcgtaatcatccttaggtcactcctttcttcactttaagcggtcttacttagcagatttaccctctttacggcgaacaacttcaccttcgtagcggattcctttacctttgtaaggctctggagaacgtacagcgcggatgttagcagcgatagctcctacacgctctttgtctgtaccttttacaactactttagtttgagaaggaacttcgatttcgatgccctcttcaggaacgatctcaacagggtgagagtatccaacgtttaaaacaagtttgtttccggatttagccgcacgataaccgacaccgactaattccaaacctctttcaaatcctttagatacgccttcaaccatgtttccaagcagactgcgagtcgtaccatgcagcgcacggtgctctttgtgatcagaaggacgagtaactgtaagcacgttgtcctcaattttgatttccatatcaggatggaaagtacgagttaattctccttttggtccttttacagctacagtgttgccttcgttcagcgttactgtaactccagaagggatctcaagcagttttttacctacacgagacatactaaaacacctccattcttgttaaacttcttaccaaacgtatgctagaacttctccaccagcttgttttgcacgggcttctttgtccgttaaaacaccttgtgatgtagaaataatcgcgattccaagaccgttaagtacgcgaggtacttcatttgatttagcgtatacacgcaaacctggtttgctgattcttttaagaccagtgataacgcgctcgttgttttgtccgtatttcaagaaaacgcggatgataccttgtttgctgtcttctacgaactcaacgtcacgaatgaaaccttcacgctttaaaatgtcagcaatttctcttttcaatttagaagcaggaatttcaagcttctcatgacgtaccatgtttgcattgcgaatacgagtcagcatatctgcaattggatctgtcataaccattatataattacctccttcccattcttggggattaccagctggcttttttcacgccaggaatttgtcctttatatgcaagctcacggaaacaaatacggcaaagtttaaatttacgaatgactgagtgcggacgtccgcagcgttcacagcgagtgtactcttgcactttaaactttggtgtacgttgttgtttcgcaatcattgactttttagccacgatttcgcctccctttcattgattatttctggaacggcatacctacttgagttaatagctcacgagcctcttcgtcagagttagcagtcgttacgataacgatgtccattccgcgaacctttgttactttatcgtagtcaatttcagggaagattaactgttctttgataccaagagtgtagtttccgcgaccgtcgaaagatttcttagaaatcccgcggaagtcacgtacacgcggtaaagatacagaaataagtttatcaaggaaatcatacatgcgctctccgcgaagagttactttcgcaccgataggcattccctcacgaagacggaatccagcaattgatttcttcgcacgagtaacgacaggtttttgacctgcgataaacgttaattcttcaacagcactgtcgattgcttttgcgttttgaacagcatcaccgacacccatgttgattacgattttttcgatttttggcacctgcataacagagtcgtagttgaacttcgtcattaaagcaggtgaaatttctttattgtacttttctttaaggcggttcatgagatagacctcccttcctttaaatactatttatctaagacttgcccagatttttttgcaacacgaacttttttgccatcttccactttgtatcctacgcgagtcacttcacctgttttaggatcgagcggcataacgtttgatacatgaattggcgcctcttgattagaaataccgccttgagggtttgcttgagttggtttagagtgcttcttcaccatgtttacgccctcaactagaacgcggtcctttttagggaaagcagcaaggatcgtaccttgtttgcctttatctttaccagagataaccattactttatcgccttttttcacatgcatcctgatcgcacctccttgagtaaggcatttatttcattagataacttctggagccagagaaacaattttcatgaagttgttttcacgtaattcacgggcaaccggtccgaagatacgagttccacgcgggctcttgtcgtcacggatgataacacatgcattctcatcgaagctgatgtatgatccgtcagttctgcgtgctccgctttttgtgcgaacgataacagctcttacgacttcaccttttttgacaacgcctcctggtgttgcttgtttaaccgtgcaaacaattacatcaccaatgttagccgttttacgtccagaaccgccaagaactttaatagtaagtacctcacgcgcaccggagttgtcagcaacttttaaacgagtctcttgttgaatcattatttgttacctcccttcggaaaaagaattccgaactttattagataataacagcttcttcgacaacttctactagacgaaaacgcttagttgcagataatggacgagtttccatgatctttacgatgtctccgattttagcttggttattttcatcatgtgctttgaatttctttgagtattttacgcgtttaccgtaaataggatcctttttgtatgtttcaacaacaacagtgatggttttatccattttgtcagaaacaacacggccttggtaaactttgcgttggttacgttcgctcatgctcacgacctcccctcagtgattatttgttggcagcaatttctctttcacgaatcacagttttcatgcgcgcgatagctttgcgcacttcacgaatgcgagcagtattttcaagttgtcctgtcgctaattgaaagcgaagattgaaaagttcttctttaagagactttactttttgttcaatttcagcagtggtaaggtcacgaatttcattagctttcatttgattcaccaccaatttcttcacgttttacgaacttcgttttaattggcaatttgtgagatgcaagacgaagagcttcacgagctacctcttcagacacaccagaaatttcaaataaaactttgcccggttttacaacagctacccagccttcaggagcccctttaccggaacccatccgtacctcaagcggtttagcagtgtaaggttttgaagggaaaattttaatccaaactttaccgccacgtttcatgtaacgagtcatcgcaatacgtgcagcttcgatttggcggtttgtgatccaagaagcttcaagagcctggataccgtactcaccaaaatgtacttcagtaccgcctttagcgcgaccgcgcatttttccgcgatgctctctgcgatatttaacgcgttttggtaataacatattattttcctccttcctcagttttcttcttagtaggaagaacctctccacgatagatccagacttttacaccaagcttaccgtaagttgtgtcagcttcagatgttgcatagtcgatgtcagcacgtaaagtgtgcaatggaacagttccttcactgtagtattcagaacgagcaatgtcagctccgccaagacggccggaaaccattgttttcacaccttgtgctccagcacgcatagtgcgttggatttgttgtttctgcgcacggcggaaagaaatacggttttctagttgacgagcgatgttgtcagctacaagctgagcatcaagatctgctcttttgatttcaagaatgttaatgtgtacacgcttgccagtaaggctgttaagggctttacgaagtgcttcaacttcagatccgcctttaccgattaccataccaggcttagcagtgtggatcgtaatgttaacgcggtttgctgcgcgctcgatttctactttagaaacagaagcgtcagaaaggcgtttgctaatgaattcacgaatttttaaatcttcgtgcaggaagtcagcgtaatctttaccagcgtaccacttagattcccaatcacgaatgactccgatacgaagaccgactggatttaccttttgacccactacttatccctccttcttttctgatacaacgattgtaatgtggctcgtacgtttgttgatttggctcgcacgtcccatagcacgcgggcggaatctttttaacgttgggccttcgtcaacaaatgcctgagaaataaccagattgttagcgtccatctcgtagttgtgctcagcatttgcgatagcagattttaaaactttttcgatgatcggagaagcagctctcggagttaagttcaggatagatactgcttcgcctacttgcttacctcgaatcaggtccattactagacgtgctttacgaggagcaatacggactgttcttgcaacagctttagcttgcatttaaaagcctcctctcttagcgtcttgtttttttatcgtcactggcgtggcctttgtaagtacgagtcggtgcgaattcgcccaacttgtggcctaccatgtcttcagaaatgaatacaggcacgtgtttacgtccgtcatatactgcgatagtgtgaccgataaattgtgggaaaatagttgaacggcgagaccaagtttttacaacttgtttcttgtccgtttcatttaatttctcgatttttgtcatcaagtgtccatcgacaaatggtccttttttcaagctgcgagccattttggaacctcccttcgtgattgcactacggtccgaaatgaaccgtagacaaccccgttatttatttttacgacgacgtacgataaatttatcagatttgttctttttcttacgtgtcttgaatccaagagtcggtttgccccaaggagacattggtgatttacgtccgattggcgcgcgaccttcaccaccaccgtgcgggtgatcgttagggttcattacagaaccgcggactgtagggcggatgcctttccagcgagagcgtcctgctttaccaacgttgataagttcgtgctgctcgttacctacttgaccgatagaagcgcggcaagcagaaaggatcatgcgaacttcaccagagttaagacgtacaagaacgtatttgccttctttaccaagaacctgagcagatgtaccagctgaacgtacaagctgtccgcctttaccaggttttaattcaatgttatgcacaactgtaccaacagggatgttgataagcggaagtgcgttacctactttgatgtcagcttcagggccggacatgatttcagtacctacttgaattccttttggtgcaagaatgtaacgtttttctccgtctacatagttgattagtgcaatgttagctgaacggtttggatcgtactcaactgtagcaacgcgtccaggtataccatctttatcgcgtttgaagtcgataacacggtattggcgtttgtgtccgccaccttggtgacgtacagtcaatttaccttggttgttacgtccgccttttttgtgaaggggcgcaagcaaggatttttccggctggtcagtcgtgatttcagcaaaatctgaagttgtcatgccacgacgtccgttagaggtcggtttatactttttaatcgccattttgaatttccctccttctttttacagataattaagcttcaaaaatttcgatttctttgctgtctgcagtaagttttacgatcgcttttctgcgacggctagtcataccagtgtagcggccgacacgttttgatttccctttgtagttcatgatgttgactttgtcaactttcactccaaagatactttcaactgcatctttcacttctgttttgttagctcttacatcaacttcaaaagtatattttttttcagtcattaaatcagcagaacgttcagtaatgacggggcgcttaagaacatcacgaggatctttcattatgcaagcacctcctctactttttcaaccgcagcttttgtaatcagaagcttctcgtggttgacaacgtctaacacgttgattccgttagcttgaacaactgtaactccagggatgttgcgtgcagaaagagatactgcttcgtttgcatccgcagttacgattaaagcttttttctcaacagataatcctttaaggatagctgccatttcttttgttttaaccgtatcaagagtaagatcttcaagaacaataatgttgttgtcgttcactttagaagacaatactgatttgattgccaagcggcgaacttttttaggtaatttgtaagaatagctgcgtggtgttgggccgaatacgacaccacctccgcgccattgcggtgaacggattgaaccttgacgggcacgacctgtacctttttgacgccatggtttgcgacctccgccgcgtacttcagaacgattttttactttgtgagatccttgacgtaaggaagctctttgcataagaatagcgtcgaatactacgctctcatttggctcaattccaaatacagacgcgtttaattcgatatcaccagcagtagaaccgttttggttgtataatgctacttttggcatgatcaatttcctcctttcctaagagacttatttagatttaacagcacttttaacagtgattaaagtttttctcgcaccaggtacgttacctttaatcaaaagaagattgcgctcagcatctacttttacgatttcaaggttttggacagtgatttgatctccgcccatgcgtccaggtaatagtttacctttgaatacacggttaggatctacaggtcccattgaaccaggacgacggtggtagcgtgaaccgtgagacataggtccgcgagattgtccgtggcgcttgattgcaccttggaaacctttacctttagatactcctgttacatctacgatttctcctgcagagaaaatttcaaccttgacttcctgaccaatttcatacgcatccatatccacgccgcgtaattctttaacgaagcgcttaggagcagtttccgcttttgcaacgtgtcctttttccggtttgtttgaaagcttttcacgcttatcgtcaaaaccaagctggatcgcttcatagccatcattttcagctgttttcttttgaagaacaacgtttggagctgcttcaataacagttaccgggataagatcaccgttctctgcgaatacttgcgtcataccaatttttcttcctaagattcctttggtcattcgtcacacctcctattaagatcattctatattttagaattaaagtttgatttcgatatcgacaccagatggtaagtctaatcgcatgagagcatcaacagtttgtggtgttgggttcacaatgtcgattaaacgtttatgtgtacgcatttcaaattgctcacgagaatctttgtatttgtgcaccgcacgaaggattgtgtaaactgatttttcagttggcaacggaatcggaccagatacgctggcaccagaacgttttgccgtttcaacaatcttctctgcagattgatcaaggattctatgatcatatgcttttaaacgaatacgaattttttgttttgccattattttccctccttttcgcctacatcacgttagacagttctccgtgagaaaaacctgatcaccttgccatggcaaagcggccgggtgtgtcagcaacctctcacttcatcgcagtcaaagaccaacatacactattatacagaaaatagacgcatgttgcaaggtttatttaaagaaccttgtggttttcacactttgattattatacaggtgataccatgattaatcaaggatatgcctgttttctttcagagatggaacgatgcgaaccggctgacaacttcggcaaagcgatccggttcctccaagtgaggcgaatgggctgagttctcaaaccaatgccattctttatacggcgcatcaaccttctgataatattcataagacgtcgtccccgggaccgtcaaatcgtatctccctgacataaaacagcacggtattataatagaagaaactgattctccggcatcaaagaaaatgagatcctcccacaggtgtttcaggctgaacatttgcccccgcgcggctaagaaactccctctcacaccgtacggttcaccaaacagcattcgcccccctgctttaagagcaccgatcggatgatgggtaaagccccctcccctcatctcgatacaaagcagaaacaacgttcgctgcagctgtttctcccatggaggcgctccgataaagctcagcgtcttttccagcaggaaatgtttgcgttgcctgctccattccatcatcagccggtaagcttccgtttcttccttttgaatattaaccacctgactgataccgatatacccataatacaaatcaggtctctcttgaagaacatgaagcgccagaactgaaccccacgaatagccggcgatatatattttttgcctgctgaattgcttgcataggcgttcggtcaaatgaatggtatcggctgtcagctgatccaaggtcatagatgaacccggaatttcctttgaataagagagacccgcccctctctgatcccagttcacaacggtgaaatgcttttccagcttattctggtattttctcgcatagccgatttggggcgtgccgggaccgccgtgcaaaaacaaaagcagcggattactcctgtcatcaccattaatcataatggtttgttcactgccattaatcagcaattgctgaagcattgaaatacgattggttttcttgaagttatcgttcatcgctctgctcctaaaatttgtatacgttctattatacatggaatcagcggggaaacaaaaaaacgaggccccataagggaccccgcattaatgaacgagtcgattactcagtgattgtagaaacaacgcctgaaccaactgtacgtccgccttcacgaatagagaaacgagttccttcttcgatagcgattgtagagataagttcaacgatcatttcagtgttatctccaggcataaccatttctacgccttctggaagattgatgataccagttacgtcagttgtacggaagtagaactgaggacggtagttagagaagaatggagtatgacgtccaccctcttctttagaaagaacgtaaacttcagctttgaatttgctgtgtggagtgattgtacctggtttagcaagtacttgtccacgttggatgtcttcacgagctacaccgcgaagaagtgcaccgatattgtctccagcttcagcatagtcaagaagcttacggaacatttcaacacctgtaacagttgttttgctgttttcttcttgaagaccgatgatttcaacttcgtcaccgactttaacttgtccgcgttctacacggccagtagcaactgtaccacgaccagtgattgagaatacgtcctcaactggcatcatgaatggtttgtcagtgtcgcgttctggagttgggatgtactcgtcaactgcagccataagttcaagaattttttcttcgtactcagcgtcaccttcaagagctttaagagcagaacctttaacaactggtacatcatcaccagggaagtcgtattcgctaagaagatcgcgaacttccatttcaacaagctcaagaagctcttcgtcgtctaccatgtcgcatttgttaaggaatactacgatgtatggtacaccaacgtttttagaaagaaggatgtgctcacgagtttgtggcattgggccatcagcagcagatactacaaggatagctccgtccatttgcgcagcaccagtgatcatgtttttaacatagtcagcgtgtcctgggcagtcaacgtgtgcatagtgacgagtgtcagtttcgtactcaacgtgtgcagtagagattgtgataccgcgctcacgttcttctggagcaccatcaatttgatcgtacgccatagctgtacctttaccagatttcttatgaagtactgttgagatagcagcagttaatgttgttttaccatggtcaacgtgtccaattgtaccgatattggcatgtgatttggaacggtcgaatttttctttagccattctaaaatcctccttaagagcttttaattagtaatgtatagagtgatagaaagtgaaagcaagctctcacttcctcatcttacaatagtagttatacttgagttaagtggcaaaatcaattattcgcctttattttttttgataatttcttcagcgatgctcttcggcacttcttcgtagtgatccatgaacattgtgaacgtaccgcgtccttgcgtgttagaacgaagggcagtagcgtaaccgaacatttcagcaagaggtaccatcgcacgcacaacttgagcgttaccgcgagcttccataccttctacgcgtccgcgacgagaagtaacatcacccatgatgtctcccatgtattcttcaggaataacaacttcaactttcatgattggttcaagaagaactgggttacatttgctgactgcatttttcaatgccatagaagcagcgactttaaacgccatttcgtttgagtcaacatcatggtaagatccatcaaaaagtttcgccttgatgtcgattagcgggaatccggctaggacaccattttcaagagagtcttcaagacctgcttgtacggctgggatgtattcacgaggaacaacaccaccgacgattgcgttttcgaattcaaagccagcgccttcttcgttcggttcaaattcgatccaaacgtgaccgaactgaccgcgtccgcctgattgacgtacgaatttaccttcaacttttgcaccggtacggaatgtctcacggtacgcaacttgaggagcaccaacgttagcttcaactttgaactcacgcttcatacgatcaacaatgatatcaaggtgaagctcacccataccagagatgattgtttgacccgtttcagggtttgtttgtgtacggaatgtaggatcttcttcagcaagtttcgctaaagcgatacccattttatcttggtcagcttttgatttaggctcaatcgctacgtcgataacaggctctgggaattccattgattcaaggattacaagatccttctcatcacatagagtatctccagtagaagtatcttttagacctacagcagctgcgatgtctccagcgtaaacagtagagatctcttcacggctgttagcgtgcatttgaaggatacgtcctacgcgctcacgcttgccttttgtagagttctttacatatgaaccggaatcaagtgtaccggaatatacgcggaagaatgtcagcttaccgacataagggtcagtcataactttaaatgcaagtgcagagaagggctcttcatcagaagaatgacgaacgatctcttcatctgtgtcaggacgtacacctttgattgcagcaacatcagttggcgcaggaaggtagtcaagaacagcatcaagtacaagctgaacacctttgtttttgaaagcagatccaacaagtacagggtagaattcaacattcagtgtacctttacggatagcagctttcagttcagggatagtgatttcttcaccttcaaggtacttttccataagctcttcatcaagctcagctacagcttcaatcaggctgctgcgaagctcttcagcttgctctttgtactcttcagggatttctttcgcatctgaacgagttccaaggtcatcttcgtagaaatacgcaacgttttctactaagtcaatgataccttcgaagttgtcttcagcgccgatcggcaattgaattgcgtgagcgttagcttgaagacggtctcttaaagtgcctacagagtaaaggaagtctgcgccgattttgtccattttgttgacaaatacaacgcgcggtactccgtaagttgttgcttgacgccatactgtttctgtctgaggctcaacacctgattgagcatcaagtacggcaaccgcaccatcaagtacacggagtgaacgttcaacttcaactgtgaagtctacgtgtcccggtgtatcgatgatgtttacacggtaacctttccactgtgcagtcgttgctgcagaagtgattgtgataccgcgttcttgttcctgctccatccagtccatttgcgaagcaccttcgtgagtttcgccaattttgtggatacggcctgtgtagaacaagatccgttctgtagtagtcgttttaccggcatcgatgtgagccatgatcccgatattacgagttttttctaaggagaactctcttgccattgggtaatttctccttccttattagggaattattattttgattatatgaatcctaccagcggtagtgagcaaatgctttgttcgcttctgccatcttgtgagtgtcttcacgtttcttaacggcagcaccagtgttgttagctgcatcaagaatttcgttagccaggcgctcttccattgttttttctccgcgaagacgcgcatagttaaccaaccagcgaagaccaagagttgtacggcgttcaggacgaacttctacaggcacttggtagttagctccacctacacggcgtgcttttacttcaagtacaggcatgatgtttttcaatgcttgttcgaaaacctccattgcatcattgccagtgcgttctttaatgatatcgaatgacttgtataggattgtttgagatttaccttttttaccgtcgatcatcattttgttgatcaggcgggataccagcttagagttgtaaagcggatcaggtaaaacatctctttttgctacaggacctttacgtggcatctgaatatcctcccttcatagttttaatgatttatttgattactttgctttaggacgtttcgtaccgtatttagaacggccttgcgcacggttttcaactccggcagtatcaagcgcgccacgaacgatgtggtagcgtacccccggtaagtcttttacacgtccgccgcggatcagtacaacgctgtgctcttgcaggttgtgaccgataccaggaatgtaggcagtaacctcgattccgttagtcaaacgaacacgagcatatttacgaagtgctgagttcggttttttcggtgtcattgtacccacacgagtacataccccgcgtttttgtggagaagatacgttagtgtgctcttttttaaagctgttgtatcctttgtttagtgcaggtgacttagagttttcaactttgctcacgcgtcccttgcgaattagctgattaattgtaggcatgttgtgttcctcccttcattacgttttataacccacatacccaggtggttcatcattaggcaaaaaacaatgtctttacacaagattgatatcttatataaaaacaaaaagtacgctataacataatggcaacagctgctgctcccacttcaattccgcaggctttgccgagctttttcatggaatccaccatacagacagcggtattttggttctttgcaagctggataacgccagctgtaagaactgaatccgcgtcttttgccacgacgacttccttcactgaacctcgttttagagctttcactgtttgcttcgtaccaataataattgatttggcctgtgatactttatcataagacataaacatatcctccaaagtaacaggttttatttcgagcaccttggttatattatcactctgcgggacggatgtcaacaacgtatgacattttttagtgcagtccaccgccagaataattgtaatactgaggaaaagctgtcgaaacagcctttcctgcagcagtttctattattcagccggaaccatatcttccgaaggctgaacgtttgaaacaggttttacttttctgtaattcatcataccggtaccggccggaaccagcttaccgatgataacattctctttcaggccgagaagttcatcgcgcttgcctttaatcgcagcatctgtaagaacgcgtgttgtttcttggaatgatgcggcagacaagaatgaatccgtctcgagtgaagcttttgtgataccgagaaggacaggacggcctgtagcaggtcgattgccttcaagcagcacttttttgttcgcttctgtgaattggtgaatatcaagcaatgtgccagggagaacatcagtatctccggcatcgatcacacggactttgcgaagcatctggcgaaccattacttctacgtgtttatcgccgatttcaaccccctgcatacggtaaaccttctgaacctcatgcagaagatattcctgaaccgttgtcaggtcagtgactttaagaagttctttcggatcgattgaaccttctgtcagcacttgaccgcgggtaatctgatcaccctcagccactttcaggcgtgagttgtaaggtgccgtgtatgaacgtgtctcaacagcgccctgaacaacaatctcctgctgtttgtcgcggacttcattgatttcggcaattgtaccgtcaatctcagaaatcgtcgcttgacctttcggattacgcgcttcgaaaagctcttggatacgcggaagaccttgtgtgatatcgtctccggcaaccccgcctgtgtggaacgtacgcattgttaactgtgttccaggctcaccgatagattgagcggcgataatacctactgcttcgccgacttcaacatcagttccggttgcaaggttacgtccgtagcatcgtttacatacaccatgaggagtgttacatgtgaacgcagaacggatccacacttcttcgattccggcttcaacgatttccagtgctttatcttcatcgatcaattcattttcgttaatgagcacagcacccgtttcaggatgtttgatctgttttctggcgaaacgtccgatcagacgctcttccagacgctcgatgatttccgtgccttctttgagcggttttgcaagaataccgcggtctgttccgcaatcagtttcacgaatgataacatcctgcgcaacatcaacaagacggcgtgtaaggtaacctgagtcagctgttttcagggcggtatcggcaagacctttacgcgcaccgtgagtggagataaagtactccaatactgtcagaccttcacggaaacttgatttaatcggcaattcaatgattcgtccagccgggttggccatcagaccgcgcatacccgcaagctgtgtaaagttagatgcgttaccacgggctcctgagtcactcatcatgtagattgggttgacttcgtctaatgatttcatcagtttgccttggataacatctttcgctgaactccaaattgaaatgactctttcataacgttcttcttcggtgattaaaccgcgtctgaactgtttcaggacattatcaactttgctttgtgcttcttcaaggatttcctgtttgtcatcgagaacgacgatatcagaaacccctactgtgatgccggctttcgttgaatatctgaaaccgaggtttttcatgcggtcaagcattttagacgtttccgtgatatggaatcgtttaaagatttccgcgatgattttaccgagaataccttttttaaacggtgcgttgatcggctgctcagcaatcacagcttttacgtcagcacctttatctaagaagaaacggtcaggtgtcttctcttcaatgttgctcttcgttggttcattcatgtaagggaatgattccggaagaatttcattgaagacgagcttaccgacagttgtaattaacaattttgaacgctgttcttcagtaaatgtcacattcttaagggagttcgctgcaacagcaactctcgtatgaaggtgaacataaccgttttgataagcaagaagcgcttcgtccgtatttttgaaaaccataccctcgccgactgctccggcgcgctcaagcgtcaggtagtagtttcctaataccatatcctgagacggcgtaacaaccggtttaccatctttagggttcaagatgttttgggccgcaagcatcagaatgcgcgcctcagcttgagcctcagctgataaaggtacgtgaaccgccatttggtcaccgtcaaagtcagcgttataagctgtacatactaacgggtgaagacggatggcgcgtccttcaacaagcgtcggttcgaaagcctggatacctaatctgtgaagagtaggggcacggttcagtaagaccggatgctccttaatgacagattcaagtacatcccatacttcaggctgcacgcgttcgattttgcgttttgcgctcttgatattgtgagcaaggcctttttcaacaagctctttcatgacgaaaggcttgaagagctcaagcgccatttccttcggcaaaccgcactgatacattttcagatgcggacctacgacgataacggaacgtcctgagtagtctacacgtttaccgagaaggttctgacggaaacgcccttgtttccctttcagcatgtgagaaagagatttaagcggacggttacccggtccggtaaccggacggccgcggcgtccgttgtcaatcagagcatcgactgcttcctgaagcatacgtttttcgttctgaacgatgatgcttggcgcgccgaggtctaacagacgttttaaacggttattacggttgatgacacgacggtaaaggtcgttcaggtcagacgttgcgaaacgtccgccgtcaagctgaaccatcggtcttaattcaggcggaataaccggaagcacgtcgaggatcatccaagacggcttgtttcctgaattacggaaggcttcaagcacttcaaggcgtttgatcgcacgtgtacggcgctgtccttgagaagtcttcagctcttcttttaacatatcaacttctttgacaaggtcgatgtcctgcagaagtttattaatggcttccgcacccatagaggcttggaatttgtttccgtacttatccagatacgcacggtattccttttcagataaaagctgtttcttttcgagcggtgtattggccgggtcagttacgacgtaagaagcaaagtaaataacttcttccagcgcacgcggtgacatatccaatacaagacccatacggctcggaatacctttgaaataccaaatgtgagaaaccggggcagccagttcaatatgccccattctctcacgacggactttagcccgcgttacttcaactccgcaacggtcacaaactacgcctttataacgaacccgcttgtacttgccgcaatgacattcccagtccttagtcggtccgaaaatgcgttcgcagaacaggccgtccttttcaggtttcaatgtacgatagtttatcgtttcaggctttttcacttcaccaaaagaccatgaacggattttatccggtgaagcaagaccgatgttcatatactcaaaattgttcacatctagcaaggggcctacctccctttttatcttcggattaaccgatgtcacttgcctttatcaatcagagactactctttcgttactgcgtcacgttcaacgtctggagatgctgtttcttccggcgcttcatcacctgataatgcaaggccgtcagcttgtttcgcatcttcctcgtcttctagatctctcatttctatttcttcttcatcgcctgaaaggattttcacgtccatacctaagctttgaagctctttgatcaatactttgaatgattccggaacaccaggctctggaacattgtcgcctttgacgatggcttcatatgttttcacacgtccgaccacgtcatcggacttcacagtcaggatttcttgaagcgtgtaagctgcgccgtaagcttcaagcgcccaaacctccatctcaccgaaacgctgtccgccgaattgggctttaccgccgagaggctgctgcgtaacaagtgagtaaggacctgtagaacgggcatgaagtttatcatcaaccatgtgtgccagtttgatcatgtacatgattccgacagatacacggttgtcaaacggttctcccgtacggccgtcataaagaactgttttagcgtctcttgacatgcctgcttcttcaagtgtttcccacacatcttcttcacgcgcgccgtcaaatacaggtgacgcgatgtgaatgccgaggtagcgggcagccatacccatgtgaagttctaatacctgaccgatattcatacgtgatggtacacccagcgggttaagcatgatatcgatcggcgtgccgtcaggaaggtaaggcatatcttcttcaggaagaatcttcgagataacccctttgtttccgtgacgtccggccattttatcaccttcagaaatcttacgtttctgaacgatatatacgcgtacaagctggttcactcccggaggaagttcgtcgccgtcttcacggttgaagacttttacgtcgtggataattccgccgccgccgtgaggcacacggagagaagtatcacggacttcacgcgctttttctccaaagatcgcatgcagaaggcgttcttcagccgtaagctcagttacacctttaggcgttactttacctacgagaaggtctccgtcgttgacttccgcaccgatacggataattccgcggtcatcaagattgcgaagcgcgtcttcccctacgtttggaatatcacgggtgatctcttccggcccaagctttgtatcacgtgcttctgattcatattcttcaatgtgaatagatgtgtatacatcatctttcacaaggcgttcactcatgatgatggcatcctcatagttgtaaccatcccatgtcatgaagccgaccattacgttgcggccgagagcaagttcaccaagctccattgaaggtccgtcagcaaggatttctcctttgactacttcatcgccgacactgacgatcggacgctggttgtagcacgtaccttggttggagcggacaaatttcagcaagctgtacttatccaggttgccttttactttttggccgtcaatttcttcatagcggcgcacccatacgtttttcgcttccacccgttcaacgataccagggtgtttacaaataacggctgcaccggagtctttaccggatacgtattccatacccgttccgacgatcggagcttccggctgcatcaaaggcacagcctgacgctgcatgttcgctcccatgagggcgcggttcgagtcatcgttttccaagaacggaatacatgctgtcgcagcagatacaacctgtttaggagatacgtccatgtaatccacgcggttgcgggctacaacggtgttttcccctctgaaacgcgctacgatgctgtcatccaagaaagaaccgtcatcgctcagcttagcattcgcttgggctacgacatagttatcctcttcatcagcagtcaggtagtcgattctaggcgttacttttcctgtttcaggatcaacgcggcggtatggcgtctcaatgaaaccaaagcggtttactttcgcaaatgatgacaatgagttgatcaaaccgatgttcgggccctcaggcgtttcaatcggacacatacggccatagtgagagtagtgaacgtcacgtacttccatacctgcgcgctcacgtgtcaaaccgcccggtccgagagctgacagacggcgtttgtgcgtcaattcagcaagcgggttcgtctgatccatgaattgagaaagctgtgagcttccgaagaactctttaatagacgcaataacaggtctgatgttaatcagctgctgcggcgtaattgtattcgtgtcttgaatagacattctttcacgtacgacacgttccatccggcttaaaccgatacggaattggttttgcaggagctcacctacagaacgcagacggcggtttccgagatggtcgatatcatcagtgtcgcccactccgtgcaggaggttgaagaagtagctgatagaagaaataatatcagcaggcgtaatgtttttaatcgcctcttcgatgtaagcattgccgatcacattgatcgtctgctctccttctgcatcggtaggagcatagattttaatggattgaagcatcacttcatcctcgacaacgccgccgttaggataaagctttctgaagccgattccattttctaagtatggcagtactttatcaagtgttcttctgtcaagaatctgccctttttcagcgagaatttcaccggtttccggatccaccagtgtttctgcaaggcgctggttaaacaggcggttcttgatatgaagctttttattaattttatagcgtcctacattcgcaaggtcgtatcgcttcggatcgaagaaacgggaatccagcaagctttttgcgttttctactgtaggcggctctccgggacgaaggcgctcatagatttcaagaagcgctttgtcactgttttcagtgttgtccttatccagtgtattgcggagatattcgttctcaccaatgagatcgagaatctcttggtcggaaccgaagccgagagcacgcaaaagaaccgtaaccggcaacttacgtgtgcgatcaatgcggacatacacaacatctttcgcatcagtttcgtattctaaccatgcgccacggtttggaatgacagtcgcggtaaaaccttttttaccgtttttgtctactttaccactgaaatatacacttggagaccgaacaagctgagatacgataacacgttctgcaccgttgatgataaaagtaccggtatcagtcataatagggaaatcacccatgaagacatcctggtcttttacctctccagtttctttgttaattaaacgaaccttcactctcagcggagctgagtaagtcacatcacgttcttttgactcttcaacgggatacttaggatctcctaaactgtagtcaatgaactctagagagaggttaccagtgaaatcctcaattggtgatatgtcttgaaacatctctctaagaccctcatcaagaaaccactgataagaagaggtttgaatttcaatgagatttggtaattctaacacttcgctaatgcgagcatagcttctgcgctggcggtgtcgtccatactgaactagttgacctgtcaactgattcacccctcaaatcatgcgtattatatgtgtaataagcatctcttacaataaagaaatacttttacaagacaaaagaaaaaagggtttctaattaagaaaaccacatccaaaaacaaataccgattttattagcatttccatgtttgtataatttatacatgcactatgattatttcagcatatcatgcaaaatatatacattggcattttacaatattaacatagctgaaaattcaagtcaaactttttttgcttttatgatataatagcctttctttttttgaaccacagaaacttcgtcaaaaagctccttcagtttttcaatggcagaaggcccgccctgttttttctgtataacgatccacaattcacctgaagcccttaaatgctcagcgcttttttcaaaaatggcatggacaactttttttccggcgcggattggggggtttgtaataatagaagcaaatgtttgagcagaatcaatatttgaaaataaatcactctgataaattcgaacgttttttattccgtttttttctgcattttcatttgacagctctacggctctttcattcacgtcaatcatgtgcacggtccggtctgtaaattcaccggcgagtgacagaccgatcgggccgtaaccgcagcctgcatccaggaagtcaccatcgatctccggctcttcaaacgcttcaattaagacacgcgaaccgaaatcaacttcctttttcgagaaaacgccgctgtcacttgtgaatgtataagatctgttccgcagtgtaaatgaccatgtctgtttatcgcttttaactgaaggtttttctgaataatagtgatcactcattattagaacctccttttataatggcacttaaagaaaagcaaagaaaaagcccgcctcataaaagcgagcttcccctacaggcaagtgaagattacttaacttctacagaagcgccaacttcttcaagtttagctttaagctcttcagcttcttctttcgcaataccttctttaagtggttttggagtgttgtcaacaagttctttagcttctttcaagccaagaccagtgatttcacgaacaactttgataactttgattttctgagaacctgcaccagcaaggataaggtcgaattcgctttgctcttcagcagcgccgccagcagcagctccgccagctacagctacaggagcagcagcagttacgccaaattcttcttcgattgcttttactaggtcgttcaattcaagtacagttgcttctttaacggaagcaatgatttcttcgatatttaaagccatttgaaattcctccatttgttttattttagggtaaaatcagattaagcgccttgttcttccttttggtctgcaactgctttagctgcaagtgcaaggttgcgaactggagcttgaagtacgctaagcaacatagaaagtaagccatcgcgtgaaggaagttcagcaagagctttcacttcttcaacagaagatacttttccttcgataacgcccgctttgatttccagagcttcgtgatttttcgcgaactcgttaagaacttttgccggagcgataacatcttcagtactgaatgcgatcgcattcggtccagttaagacatcattcaaaccatcaagttcagcttgttcaaccgcacggcgagtcattgtgtttttgtacactttgaactctacgttagcttcgcgaagctgtttacggagttcagttacttcagaaacgttaagtccgcggtagtcaacgatgatcgttgatttgctttctttcagtttagaagcaatctcttcaacaacaactttttttgtatcaattgcgctgctcatggttacacctcctgtagattttgtgtaacacttataccgctaggtgatcacgactgtgacgacgatttcatataaaaagcctccatgtggacatggaggctgtatatacaagcatacgtaacgtaatagctgtgatatatatacacctcggcaggatattaagcctcaacggcccctgctgtctacggtataaatgacatattatattttacaacattttgaatcatatcagaatgctgatctaaagtcaaatattattttacgttgaaagtagaagcgtctactttgacaccagggcccatagtagaagtaacggcaacgtttttcacgtaaacacctttagccgcagccggttttgctttcaggattgtatcatacattgttgtgaagttctcaacaagtttttcatcctcgaaagaaacttttccgatcggaacatggatgttaccagctttgtcaacgcggtattctactttaccagctttgatttcgccgattgctttttctacttcgaatgtaacagttcctgttttagggtttggcataagaccttttggtccaagcacacggccgattttaccgacttcacccatcatgtcaggagtcgcaacgattacatcgaattcgaaccagccttgctggattttcgcgatgtaatcagaatcgccaacgtagtctgcaccggcagcttcagcttcttttgctttttcgcctttagcgaatactagcacgcgctgagttttaccagttccgttaggaagtacaactgcaccgcggatttgctgatcgtttttacgagggtcaacccctaaacgaaaagcaacttcaactgtagcgtcgaatttagctgtgtttgtttttttagtaagcgccactgcttcagcgacgtcgtaagctttcgcacggtctacaagcttcgcagcttcaacgtactttttaccttttttagccattttaaaatttcctccttatgtggttatagcggaataacctcccacgaataagggttgcgaacttgtgaaaactcgcaacccgacaagaaacaaattaatcctcgataacgatacccatactgcgggcagtaccttcaaccatgcgcattgccgcttcaacgtctgctgcgtttaagtcaggcattttcgtttcagcgatttcgcgaaccttatcgcgcttaacggttgccactttattacggtttggttcaccagaaccagactcaattccagctgcttttttaagcaatactgcagcaggcggagtttttgtaataaatgtaaatgaacggtcttcgtaaaccgaaatttcaacaggaatgattaaaccagcttggtcagctgtacgagcgttaaactccttacagaatcccatgatatttacaccggcttgacctagtgcaggtccaactggcggcgctgggttagcttttccagcaggaatttgcaattttacaacttttactacttttttagccacgagacacacctccttaagtccgtgatgtggtaatagggtaaaccctcccactcaaggtttcattctttatatgaatgacgaaatatcaagctagctgccttggattagtccaagacgtacctttgctatattatcattaatatatagcaatttcaagttttttcacattacaatttgtcgatctgggtaaattccagttcaaccggcgtttcacggccgaacatgttaacgaatactttcactttgctcttatcataatcaatctcttcaattgatcctgtaaagttggcgaaaggtccgtctatgactttgactgtctcattcaattcaaaatcaatgtcggttttccgctcatccatgcccatgcgttttaagatggtttccgcttcgccaggaagaagcggagtcggctttgagcctgaaccggctgatccgacgaatccggtaacgcccggcgtgttgcggaccacataccaggaatcatcagtcatgacgatttcaacaagcacataacccgggaacactttctttttgactacttttttcttgccgttcttaatatcagtctcttcttcttcagggacgacaacgcggaaaattttatcctgcattcccattgattccacacgtttttcaaggttcgcttttactttgttttcataaccggaatacgtatgaacgacataccaattcttttccattctatcaggactctgcagtccttccctccccgcatttaaaaatgaagtgtaaaacaaaaaataggctcagggcctatgaatccttttttcaacaacacaataaaaaacccgctgaacgggttttggcaaacgatattatgatctattatagcacgtattgctgatcattattcaactattaaacgaattaattgagaaattcctgtatcaaggagggcaaaaaagataacaaaaaagataaccgttgaaatcaccgtgatcgtatagcgcgttaactctttgcctttaggccagctaacctttttcatttctttcccaacatctttaaagaaactcatcatgcgcatgtaaaagacctccacaatttaaaaagcgaacactattttgtttctaaatgagctgtatgtgaattgcaagtgctgcagtacttcttaacttctaaccgctcagccgctgatgcagagcttttcattgtcgtataattacgatttccgcatgttttgcatgccagcgtaatcttttttctcatgtcgttacaccttttcctaaacattcatttatcttaataaaatagcacagtcagaaaaattctgtcaatatgacacagaaacctgctacaggctgatctctcttatttctaaatacttttcaagcttgcgcttcacgcgctgcagggcattatcgattgattttacgtgtcggtttaagtcatctgaaatctcttggtaacttcttccgtccaagtacaaaacaagcacctttctctccagatcgctcagcagttctcccattttcatttcgatatcatcaaattcttcctgattaataatcatctcttcaggatttaacgttttagcgcctgaaatgacatcaagcagtgttctgtcagattcttcatcaaaaataggtttgtctaaagaaacataggaatttaaaggaatgtgtttctgacgggtagctgtctttattgcggtaataatctggcgggtaatgcataattctgcaaaagctttaaatgaagtaagcttgtcctctctaaagtctcggatagacttatataagcctatcatcccttcctgtacaatatcttctctgtcggcccctattaaaaaataagaccttgctttcgcccgtacaaaattacggtacttcgtaatcaagtaatctaacgcatcactatccccaacatgaaccttttcaatgacctgctcgtcctccaactggcaaaattgcactttgttgaactttcccttgctgttctgtagattcactgcgatccccccggcgcacgtagatagaaatattatacattaatgggcgaaaaagcgtcaacctaatccagaccgcctcggcgccacttttcaaacgttttcaaaacctcttcggacagctcgattttacccggtggtttttcagaagtgatctttgaaacccgcctttgaatccggcgttctatcgtatccacttccctcaggagctcccgggcggatttacggagagccccttgtccgaaaatcgcccactgctccgtataatcggaggttgcgacatgaatctgtgtcgcaatattattcagcgcctgggcaagcttctcgatccgctcatccgccgtttcattctcccgtgtgaaaatcacttcgactctgtgattcgtttgttttttctctatgccttttaccaggtgtgcgtcaaacaccacaatgactctgattcccgtgtaggactgatattccgccatcttctggatcagtacatctctcgcttcttcaaaactgttcgcttttaaatcctttagctgcggccaagctccaatcatgttgtatccgtctactaacaggatgtccatctgtcttcattcccctaaaggattgcgcttccggtagacttcatacatgagaaggccggccgctaccgacgcattcagagaagtgacttttccggccatcggaagcttaatgagaaaatcacatttctctttcacaagccggcccattcctctgccttcgcttccgataacgagcgccaaaggcatcttgccgtccatagagcggtagtcttcccgggcggatgcatccgttccgacgacccaaatcccccgctccttcatttcatcaagtgtccgggcaaggttggtcaccttcacgacgggaatgtgttcaatcgcaccggtcgaagcttttgcgaccgtcgaagtcagtccgaccgctctgcgtttcggaatcacgatgccgtgtgcaccgacagcgtcagccgttctcatgatggaaccgagattatgagggtcttccagctcgtccagtatgagaaagaaaggctgttcgtttctctcttccgctcttttatataattcgtctaattgtgcatattcatatgccgccacctgggcgacaacaccctgatgctgcccctccaccatctgatcgagttttttcctcggtacaaattgaatggtgacgccgcgctttttagcaagctccataacttgctgggcctgtccttttactgtgttttccgccatccataacttatacagcttgcgatctgacttcaacgtctcaatcaccgcgttttttcctatgacgtaatcatgttgctgactcatttgttttcctccctgacgtcccgacttgtatagcctcagcaatcagctgattcagtctttcttctcttttctcaagaaaaaggtatccgagtaaagcctcaaaagctgtactatggcggtacgtctgtacatctgtgtttttaggcgtcgtccctgatttcgcgtttctgcctcttctcagcacggcttcctcttcctccgtgaaaaaggattcgtcctgaaggcggaacaatatgtctgcctgtgattttgccgatacaatccggctcgccttcttatgaaggtcattcggtttcgtaaagccctgcttaagcaggtgatgccggacgtatatttcaaaaatggcatcacccatataagcaagcgcaagaccgtttaactgctttgaatctttgatttgttcaaattgaagcatccgcttactctccccgcttccagcgagttccctgggccgtatcttcaagaatgatattcatgcttttcagctgatcgcgaatctggtctgacaaagcaaaatcgcgattgcggcgggcttcatttctcttctcaatcaactcttcaatctcttcgtcgacaagctcttcttcgccgagcgtaagtccgagaacagatccgattctgtcaaacatgctgataaaggctttaatgacgtgatccgccgtattgtcttcctgcatgtagtaattggcgagcttcgccagatcaaaccaaacggaaatcgcattcgccgtattaaaatcatcatccattgcttcttcaaacgcagtgcggtgctcttcgattttagcgagccattcctcatcattgtcagtcagattcgtgctgctaatcaaacgatggtttaaattactgtaggccgtcttcaggcggttaaacgcgttttttgttttctcaagcagctcttccgaatagttgatcgggtggcggtaatgaacggacagcatgaaaaatctcaaaagctgcgggtcatattgcttaatgatatcgtgcaccaaaacaaagttgccgagcgattttgacattttctcattatcgatattgatatatccgttgtgaagccagtattttgcgaatgtcttgcctgttaatgcttcagattgggcgatttcgttttcatggtgcgggaatgtcaggtcctgaccgccggcatgaatatcgatttcgtcacccaaatactttttcaccattgcggagcattcaatatgccagccagggcggccttttccccaagggctatcccatgaaatttctccgtccttagcagctttccaaagagcaaagtccagcgcatcctctttcttctcgccgacacggatacgcgcgcctgatctgagttcatcaattgattgctgagatagtttgccgtacccttcgaaggcccttgttttgaaatagacgtcgccttctgattcataagcgtagccttttttaatcagttcgctgacaaattcaataatggcgtccatgttttccatgacccgggggtgaagatccgctttccggcatccgagggcgcccacgtcttcaaaatacgctttaatgaaccgttcagaaacggtcgggacgtcctcgccgagctcgttggccgccttaatcagtttgtcgtcaacatcggtgaaattcgatacgtattgaacatcgtatcctttatactctaaatagttgcgtacggtatcatacacaatcgccggacgggcgtttccgatatgaatatagttgtatacagtcggtccgcacacgtacatttttactttgccttcctcaagaggaacgaatgtttcctttttccgtgtcaatgtattataaagtgtaatggtcatttttggttgatcctttcttttttatcttccagttcagcctgcagttcaaaaatctgctgctccaatgctctaaacctgtcagcaaccggatcgggcaagtcttggtgattgagatcgcgtttgatttttcttccgttctgaatgacgactttccccggtatgccgacaacggtcgaaaagtcgggaacatcacgaagcacaacggagccggcccctactttagaaccctgcccgaccgtaatagagccgagcaccttcgctccggttgcaattaaagcatcatcttttatggtcggatgccgcttccccttttcttttcccgttcccccgagagtgacaccttggaataccgtcacgttattgccgatttcacatgtttcccctataacgacccccataccgtggtcaatgaaaaaccttctcccgatggtcgcgccgggatggatttcaattccggtaaagaaacgggcaatctgtgatatcaggcgcgccaggaagaaaaatctccgtttatataaagcatgtgcaatccgatgcgcccatatagcatgtaaaccagaataagttaaaacaacttcgaaatagcttcttgctgccggatcttgatcgaacactgtatctatgtcttcttttagcattttaaaaaacacatgcttccccccattctctccccgctccagtctgtttttccgcctataaaaaaagcgcctctgcatgtaaacatgacagagacgcttttaccgcgcggttccactctgtttgaaaaacaagtcactgttttcccaacttaaaagccggtaacggcggcggccgcctttaaatactgatttccgcagaaatgttcttcaaaggtcttaagggcgcacttctaaaacatgacgcatgaatctctctcagccgatgaagattctttctgtaatggtcattgttttatactcttccctgtcaacaatcgtatatttaaatgcttttcaggcgtctgacggctgtttctctgccgatcagctcaatggcctgcggaagctcaggaccgtgtgtctgaccggtaaccgctacgcgaatcggcatgaacagctttttgcctttatgacctgtttctttctgaacagctttgattgaggctttgatcagctcaggcgtaaattcttcaagctcttcaagcttcgcagcaaatacgctgagcacttcaggcacctgttcctcttccagaacggcttttgcctcttgattatactcgatctcatctttaaagaacaaatcagtcagctcgacaatttcagcgccgtagctcaattgctcatggtaaagagaaattaatttacgaacccattcctgctcctcggcagaaagctcagtgccgacttttcctgctttttgcaggtgcggcagggtcagctcaaccacttgatcaagatccagcgctttgacgtattggttgttgacccatttcagtttatgcatatcaaacagagccggtgacttagacaaacgattcacatcaaaaatttcaatgaattgttctcttgtgaaaagctcttcttcaccgacgggagaccagccgagaagtccgataaagttaaacagcgcttcaggcaggtaacccagctcatcatactgctcaataaactggataattgattcatcacgtttacttaattttttgcggctttcgtttacgataagcgtcatatgtccgaagacaggaacatcccagccgaatgcctggaaaatcatgatctgtttcggtgtatttgaaatgtgatcctcaccgcggagcacgtgcgtcattttcattaagtaatcgtcaatcgcgacggcaaagttatacgtcggtgttccgtcttttttgacgatgacaaagtcgccgatgccgtctgattcaaaagaaatctcgccttttacgatatcgttaaatgcgatgattttcccttccggcacgcggaaacggatgctcggctgtctgccttcggctaaaaactgctcctgctcttcctgagtcaggtttctgtgtttgccggaatagcgcggcatttccccgcgggcgatttgctcttcacgttctttctcaagttcttcttccgtacagaaacatttataagcaagccctttttcaagaagctcttcatagtactttttgtaaatgtcgttacgctcagactggcggtacgggccgtattctccgccgatatccacactttcatcccagtccatgccgagccatttcaaatagttgagctggctttgctctccgccttcaatatttcgctttttgtccgtatcctcaatccggataataaactttccgccttggctgcgggcaaataaatagttaaaaagcgccgttctggcgttaccgatatgcaaatgtccggtcggactcggtgcataacgaacgcgtacttcatttcccatgttcaaatacttcctttcatctcgtctgtagcctctagccgaatatatgtatctattctaccaccaaatagaccgggcatcaaaacaatgatcaggctttttggatcagaacggtcgcctgagcggcaattccttcggctcttccggtaaacccgagcttttctgtcgtcgtcgcttttacgtttacttgagagacgtctgcctcaaggccttccgctatccgttttctcatagcatcaatatgcggcgccattttcggcttttgcgcaataatcgtgcagtctatatttccgagtacgtaccctttttcttttacaatgttccagacatgctgaagcagcttaaaagagtccgcatccttgaattccggatcagtatccgggaaatgcttgccgatatctccttcacctgccgctccgagacacgcgtctgcgactgtatgcagcaatacatcagcatctgaatgtccgagcagccccttttcataaggaatttcaattccgccgatgatgagaggacggccttccgttaattgatgcacatcaaatccttgtccgattctaaacattatgattcccactttccgctttcatgattgcttccgcaaatatcaggtcatccggcgttgtcagcttaatattggtatagctgccttcaacgatactcacctgatatccatcaagacgctcgacgaggctggcgtcatccgtccctaagaagcctttgttttccgcttccatatgcgccgtcttcaataaagaaagacgaaaagcttgcggcgtttgaacggcccacaagcttgaacgatcaaaggtctccgcaacccgggagccttccgcccgttttatcgtgtctttcacaggaacagccaggacagccgctcccgcctcctctgctgtttccacgagcttatcgatatgctgatgtgtgacaaacgggcgcgctccgtcatgaacaaggacgacccagtccttatcaatcactttcagtccttcgtatacactgtgctgacgctccgcacctccggtaacaagctcaatttccgtctgaatcggaaattgggccagcagctggcgaaaatcttcccgttcactctcgtttatcaccaggattattttctgacagggtgcgtggctttcaaaaacccgcagtgtgtgtataataacaggcgcaccttttaagctgatgaacagcttatttttcccggccttcatccgttttccttgtccggcagccggaataacgacaacatactccatatgaactccctcttaaagagctttctcaagcagcttgggcttggcaaaaatcattcgtcccgccgctgtctgcagtacgctggttacgagcacatcaatatgtttccctatataattgcggccttcttccacaacaatcatcgtcccgtcatccaagtaagccacaccttgattatgctctttcccgtccttaatcacctgcacattcatctcttcgcccggaagcacaaccggcttcaccgcgtttgcaaggtcattaatattcagtaccgcaaccttctgaagctcacatactttatttaaattaaaatcattcgtcacaacgacgccggatgtcagcttcgcaagtttgacaagcttgctgtcaacctcctgaatgtcctcgaagtcgccttcataaatttcaaccgtaatatccagttccttttgaatgcgattcaagatatccagtccgcggcgtcctctgttacgttttaaaacatctgaagaatcagcgatatgctgtaattcctccagcacaaattgaggaatgacaatgacgccttctaaaaagcccgtctgacaaatatctgcaattctcccatcaataataacacttgtatccaagattttcagccttttatcctgttcctcctgctcctcatcagcacttccctttttcttctgcattcttgcagaaatggagaaaagactgatcagttcatcctttttcttaaatccgacttggaagcccaggtaaccgagaaagaaagccagaaagaccggaatgatggtgctgaatatacggtacggaatattgtccagcggaatcacgtttacaatgagatatgcgatgataagtccaaaaaccaatccgagactcccgaataacagatccggcaccggagctctcagcaaagaatcttcaatccattttacccaattaatcacatattctgtcgtccatatactgatgagaaaaaagataatagcaccaattgcagcagacgtatatgcgtttgttattaaaggtatgtcctgtatatttgacagcacaaacaattcaggtattaaaaagataccgacaacgccgcccacaataatgaagaacgcctgaactattcgttttaacatacctccacctccttttaagtagcattttttcagcagactgtcagagcctacaaattcagaataaacaaaaactaacaataatatacccggattccgacaggtttaagcgattcttaaagctgtctatctatatagtgtttttcctgaaggcgttttaagccttttttgatttttttggcgcgcacttcgccgataccctcaacatcatcaagctcttctacagtggcttccgttatgcttggcaaaaatccgaacgcctcaaccacattttcaacaatcggcatcggcagacgcggaattttgttcagcagcctgtatcctctcgggagcacataatcatcaatattggtagaagccggatatccaagcagcttaaacagaatggaatcatcaagcaggtcatagctggacatatcctgaagctcttttaacagcacgaacggatctttgattttttctttgacatagtctttgatgaaaagtgccgcctcttcttccatgtccgtaatcagttcaatcacctgcagacggattaagtggccttccgttccgagttctttaatatacatattgatttcattttttattcggagcaccatttcatatcgatgcatgacggacagcacgtcactgaatgtcacaagctcctcaaactctaatgcgtttaaagccgtaatcgttttgtctaaaatggttttatacttctcaagcgtttgaatggcctgatttgcctttgttaaaataaatcctatgtcctttagtgtgtacttcatgctgtcctgatataacgtaatgacatttctgcgctcagaaatggctatgacgagacagccggtctgcttcgccacccgttccgccgtacggtgcctcattcccgtttctgaagaagaaatggtcgcttccggcataagctgcgtattcgcataaagaattttctggccggaatcacttaaaataatggcaccgtccattttggccagctcgtataagtgagcgggcgcaaatgatgtattaatatgaaaaccgccatccacgacttgctttaccttatcattgtatccgacaacaatcaggccgcctgtatttgcccgaagtacattctctatcccggctctgagcggggtgcccggtgcaacgaactgcagaattgcagacaggtcaagctcttgtttcgccccttttttctctttttccatctattatgatcctcctaatgaagtacgaagcgcttctgcaacatttgctactccgacaacctcaatcccttttggtattgtccacccgtctgcattcgcctcaggtatgatcatgcgcttgaagccgagtttcgccgcttcctttacgcgctgttcgattcttgacaccctgcggacttctcctgtcagacccacttcaccgataaagcaatctgcgggattcggcggtgtatctctgaagcttgaggcaatgctgacggctactgccaaatcaatcgctggttcatccagtttgaccccgccggcgacctttaaatacgcatcttgattttgaagcaacagacccacccgcttctcaagcacagccataattaacgataccctgttgtggtcaatgcctgtagccatgcggcgcgggtttccaaaactggtcggtgaaatgagcgcctggatttcaaccagaatcggtctcgttccttccattgacgcaacgatactcgaacccgatgccccggcagaacgctcttccaagaaaatttcagaagggttcagcacttccgtaagcccctcttcccgcatttcaaagatgcccatttcatttgtggagccgaaacggttttttacggcccgcaaaatacggaatgtatggtgccgctctccttcaaagtatagaacggtatcgaccatgtgctcaagcaatctcggccccgcgatcgatccttcttttgtgacatgtccgacgataaaaataggtatgccgtttgttttcgcgattttcatcaattcggccgtacactctcttacttgtgatacactgccgggagctgaggtgatatcactttgataaacggtctgaatggagtctacgacaacaaatgcgggtttcatctcttgtatagcagacgaaatatactccatatcggtttcagataaaacatgtaacatttggctgttgattccaagtctgtcggcgcgcagcttcgtttgcttcacggattcttcccctgaaatgtaaagcacgctgccggccgtatctgctaattgtgcggatacttggagaaggagcgttgattttccgatcccgggatcgccgccgattaatactaacgagcctttcacaacgccgccgccaagcactctgttgaattcttcgagctttgtttgaacgcggggttcttccgatgtttcaattgatgtaatgggtgatggtttctggacggtttgaacggagtgggagaaagccgcccgccgattcgccggcgctttttttatggtttcttccaccattgtattccaagccccgcagcccgggcactttcccatccactttgcggattcataaccgcatgagtggcagatgaattttgtttttgatttagccatatatgttgtaagacctcttccttatcgaatatttctctatataacaaagtgaggcatacacttgcttacgtatgcctcatgtttgtcactatattagttcgttttagcagttgtttttacgacaaattcgccgtcctcaacatcaagaacaatgtgctggcctttatcaatattgcctctgaggagttcttctgataaccggtcctccacatgcttttgaatcgctcttcttaacggacgtgcgccgtattccaaatcgacgccctcttctgccacttttgcttttgcagcatccgtcagctcgatagagagatcttgttctttcagacgttttgttaactgatcagacataagcgacacgatgtctgtaaggtgttttttctcaagggagtggaagacgataatttcgtcaatccggttgataaactcaggtctgaaggcacgcttcagctctcccatgactttgtctttcatgtctttatggttttgtgattcatcctgcacattgaagcccacatatttgttgcgtttcagctcgctcgctccgacgtttgacgtcataatcaggatcgtgttgcggaaatccacagtgcgtccttttgaatcagtcaagcgtccgtcttcaagcacttgcaggagtatgttaaacacatcaggatgcgctttttcaatttcatcaagcaatacgacagaataaggttttcttctcactttttctgtcagctgaccgccttcatcatagccgacatatcccggaggagaaccgacaagacgtgaagtcgagtgtttctccatgtattcggacatatccactctgatcatcgcttcctcatcaccgaaaatggattccgccagcgctcttgccagctctgtcttcccaacgcctgtagggcctaggaagatgaatgaaccaatcgggcgtttcgggtccttcagaccggctcttgcacgtctgacggcctttgcaacggctacaacagcttcatcctggccgatgacgcgggagtgcagaatgttttccatattgagaagcttatctgtttccgtttgggcaattttagatacaggcaccccggtccagctggatacaaccatcgcgatatcctctacagaaacttcggagttctcctggccttgtttttctttccaggtttttttcgtgtcttccacctgttctctcaggcgctgctccgtatcacgaagggaagccgctttttcaaactcctggctctgaacggcagcgtctttttccttgcgaacttcatcgagtttctgctcaagctcttttaagttcggaggcgttgtgaacgaacggagacgcacttttgaaccggcttcatcaattaaatcgatcgctttatccggaaggaagcggtcagaaatataacggtcggacaattttaccgccgcttcaatcgcttcatcggtaatggatacgcggtgatgcgcttcatagcggtcacgaagcccttttaaaatttgaatgctttcatcggctgagggctgatccacctgaatcggctggaaacggcgctcgagagcggcgtctttttcgatatatttacggtattcatcaagcgttgtcgcaccgatgcattgaagctctccgcgggccagtgaaggttttaagatattcgacgcgtcaatcgcaccttctgctccccccgctccgatcagtgtatgcagttcgtcaatgaataaaataatattgccggcctgacgtatttcatccattacttttttcaagcggtcttcaaattctccgcggtatttcgtaccggctacaaccgtacccatgtctaatgtcattacgcgtttatcacgtaaaatttccggcacttcattattgatgatctgctgtgcgaggccttcagcaatcgcagttttacctacacccggttctccgataagaacggggttattcttcgttctgcggcttaatacctcaataacacgctgaatttctttgcttcggccgataaccggatcaagactgtcttccttcgcaatcgcagttaaatcacgcgccagactgtccagcgtcggcgtgtttgcattgctgttcgtaccggatgcagaagatcccgtctcattgcttcccagaagctgcagcacttgctgtctcgccttattcaagctgacaccgagattattcagaactctcgccgctacgccttctccttcacgaatcagtccgagaagtatgtgttctgttcccacataagaatgtcctagctttctggcttcatccatgctgagctcaatgactttttttgctcttggcgtataatgaatcgtttgagacatttcctgtccccgtccgattaagctctccacttctttctgaattttatccgaaccgagtccgagtgcttggagtgctttagccgcaatcccttctccttcacgaaccagacctaataagatatgttcagttccaatattgttatggcctaagcgcagtgcttcttcctgtgccagtgccaataccttttgagctcgctctgtaaaccttccaaacatcatatcgaatcatcctcctgtctatttgcactcatttctaaatgcagcctttccctgataagagccgctcttctcgcgtctctttcgttcggccgtaatgcaccgcccgaatattgctggagaaaacccggctgtgtcaaaatcatcagttcattaagtatattgcttgatagccctttaatgatccccaggtctatccccagccgaacgtcagaaaggcatttcgccgtttcctttgattcaatcatacggcagttggataaaacaccgtaagacctgaatacccggtcctccaattcaattttcgaggtttggtaaagcgcttctcgggctgaacgttcctgctcaatcagctgggcagccacactgtttaaatcatcgacaatgtcctgttctgattttccgagtgtgatttgatttgaaatttgaaagatatttcctaatgcttcgctgccttcaccgtaaattcctctaacaactaaacctaattggttaattgccggtataattcgattcatttgcctagttaatacaaggcccggcaaatgcatcatgactgaagcccttagtcccgtccctacatttgtaggacagcttgttaagtaccctctcttctctccaaaggcgtaatccactttctcctcaatccagtcatcaacctggtttgccgcttttatggcattgagaagctggaagccggggaagaggcattgaattctgatatgatcttcttcatttaacataatgctgacttcttcattttcagaaagcagacagccgccaaaaggggattccgttaaattcgggctgatcagatgtttctccatcagcacccgtttttccaaaggctgagcttcactcattctgattaaatgaaattgaccgatatcaggcagttcttttcctgaaaagtgatcttcgaattgctgaatgatggatgaggcttcttcattcgtataccgggcgggaaactttatattttcaaagtttcgggccaaccgtatacggctgctgagtacaatgtcactttcaggtcccttttgcttcatccaattgcttagtgcgtcctgaataaaatgcttgagcgacattacccttgttccccctcactgtctttactttttaacttctgctctaacgatcggatctgatccctgacctccgctgctctttcaaactcttcgtggtgtattaaagattcaagttctttttttaacatttccatttgccgtcttacatgcaggtttccgcctattcgttttggaattttcccggcatgcaccgtattcccgctgtgaacttttcgcaagatcggcgtaatttggctgtagaacgtatcgtaacattccgcacagccgaaacgccctgtttttctcagctgctgaaacgtcataccgcatttcttacaagctgtgccttgctctgagtagccgaacatttgagaaccggtgttttgaaatgaagactccatattcagcagccctgataataaattatggatcgagaacccttggtttccacttatactgtatgaatcgctattttcttttgcacattgttcacaaatatgaacttcttgtttttctccattaacaactttcgtaaagtgaaaagtggccggtctctcattgcattcttgacaaatcaatcttttcacccgcttactttagttttaaagatgtgagcattgctttcatcattctggctcttagttcatcccgttcgggcaaatcaatatatagaactgaacgatccattacactcaccatcattttagcttctctttccgaaataactccgtcctctaacagtctgagaataatgtcatcagaggctgcctgggacaagtgggtatgaatctgcgaaataatattattgatgaggacgacttcgttattcattttaattttgataatacgaatataaccgccgcctccccgtttactttcaacaatatatcctctttcacttgtaaatctggtgttgatgacataatttatttgggaaggaacacattgaaatttatcagcgatttcactgcgtttgatctctaaaatttctttgccattttgatctaatacttgtttcaagtactgttcaatgatgtcagaaatattatgtcccactcaaccccctcctttattgactttgactatatttgactttaatcttactataaggtgtttcgcaaaatttttcaactgtatcgctctatctctattatttccactttgcacaagcataaaacctgcttttgcaaaaaggcatatcgttacgtttctcatattatataacgtatgcagaaaaacacaaaaaaggcagctcatgatgagctgcctttaccgtaatgatagcttggcggcgtcctactctcacagggggaaacccccgactaccatcggcgctgaagagcttaacttccgtgttcggcatgggaacgggtgtgacctcttcgctatcgccaccaaaccattgagagtgttctctcaaaactagataacagtaagcatacattcaaattggttaagtcctcgatcgattagtatctgtcagctccatgtgtcgccacacttccacctcagacctatcaacctgatcatctttcagggatcttacttccttgcggaatgggaaatctcatcttgaggggggcttcatgcttagatgctttcagcacttatcccgtccgcacatagctacccagcgatgcccttggcagaacaactggtacaccagcggtgcgtccatcccggtcctctcgtactaaggacagctcctctcaaatttcctgcgcccgcgacggatagggaccgaactgtctcacgacgttctgaacccagctcgcgtaccgctttaatgggcgaacagcccaacccttgggaccgactacagccccaggatgcgatgagccgacatcgaggtttttcaccttaacccgacactgccattgatttttctgcataatgcgctgaaccgttttatggttaatacacattctcttttttagtatggctgtgatttttcgatatccatatcgatacttgtgctctcggcacaacgtgccgatttgtttttccaaatggcgcttgggatgatccttcatcagattcttcttccaacgataataagacgctcgagagatacctaaatgaatacagatatcctgtacggtcattgtgctgtgcaatatttctacaagttcgactgacgtttcgctatcaacttcctttccaattcgttgtacttttttaaaacttcattctgttgtctcaggtaacgaatctctgcctgcagtttctctaaatcggaagaatactccggaccttttccgtaagtgtattgctttccaacaggctgttcgaatcgatgtgtatcaccagccttataccatctaacccatgtctgaacctgtgtcttattcttaatattcaactcctgcatgatctctttcataggtacgcctgccaatctcatttctacagccttctgtttcgcttcaaccggataactcactcttgtccccatagaaaaaacacctccaagtctaatttcggataacaacgatccgttttcaaacttgaaggtgttttttgtttgtctcatattatggggtcagtcccgcgctgcagggttctttttttggttattgggattttacggcttgcacgcgggctctgcttttccggtttttcaagtaataagcggkgtagcaaacggccataaatgcaattccgcaataaagggcgatggcctggttcggatcaaaagcgatgccgatacaggaggcgaggcataggagaaaggccgctatcggtacggccggatatcccggtgtcctgtatttcaagtctgaaagctggtgcccttctgtaagaaaccgtcttcggaacaaaaattgcgatgcggcaatgctcatccacacagcaactaccgcaaatcctgagacggagacgagaacaagatagactgtatccgctgcaaatacgcttgacaacaacgacagaatgccgccgatcatactgaagatcagagcgttaaaaggaatgccttttgaggtcagcctggcaaaggcgggatgaagctccccttctttagacagggaccacagcatacgtgatgacgcgtacagccctgaattggccgcagacagaagcgccgttaaaatgacgaaattcatcagatcggccgcataaggcacgccgactctgtcaaataccgtgacaaacgggctttcaatcacaccggcttccttgatggagatcatccctgacagcacaaaaatcgttccgataaagaaaagcgccagccgccagactgtagtcttaatggcgcgcggaacggttttttccggatcggcgctttcccctgcggcgattccgatcaattccgtccctgaaaaagcgaagtttactgaaagcatcgtcatcagtatcgggaaaaagccatttggaaaaaggctgccgccatccgtaaagttcgacagcataggtgcggcctcaccgcttttcatcgggacgatgccgaacatcgccgctccgcccaataaaataaacagtaagatggctaagactttaatgcttgagaaccaaaactccgattcagcaaaaaatttcacggagaaggcgtttaataaaaagatgaaaagagcgaataccgcactccacatccaaactgaagtatgcgggaaccagcgctgcatgaaaagcccggccgccgtgaattcagagcccagcgccaccgcccacgtcagccagtacagccatgcgaccgtaaagcccgtcgcgggcccgatataggtcttcgcataggtgtggaatgcgcccgtcaccggcatggccactgacagttcaccgaggcaaagcatgacaagatagacgatgcccgcgcccaaaaggtaagcgaaaatggtgcccgccggacccgcctgatgaatggtatacccagagcttaaaaacagccccgttccgatcacacctccgagtgatagcataaagaggtgtctgcttttcatacttctctgaaaattcgtctcgttcttgttgttcattgttttccaactttctgcgagagccgttctaataaaaaatctcatgccggcgaacggcacgagattccggcgaaccggctttttgaatagaatatacaaactattccgattagtcaagttgtttttaaggtcttggcccaatcggcaatggcttggatgtccgcgggtttcgtccggcagcagcctccgatcaggctcacgccgttttcgtaccagctttgcgcgctttttccgaaatggttttcgcacgctgcgcctttccaggtttttgtcactgggtcatattgttcgccggagttcggataggcgataatcggtttggacgttgcccgtttgatttcttctatcagcggcggaatatgttcaatcggtgtgcagttgatgccgatcgctgcgatttggctgcaggagtcaagcagggccgcacattcggaaataggcgtgccttcgctgatatgccgtccgtctttggcgctgaagctcatccatgcataagtgccggggaattcctccagcagccttgtgatcgcttttgcttctgacagacacggaatggtctcacaggccaaaagatcggcgccggattctataagggctttcatccgggggcggtgaaagctgatcagctcatcctccgtcagtccgtaatgcccgcgatattctgagccgtcagcgaggctcgcgccgtaaggtccgatagaagcggcgaccaaaggtttgggccggtgtaaacggttttcttcatgcgcccaaaattcatcgcgtgcttgtgcggcaagttcaacagatgtctgaatgagacgtatcgcatcggtttccgggatgccgcgcgctgcaaatccttcgattgtcgattgataactggcggtgatcgcgcaatcagcgccggcggcaaaatattctgcatgcacctgtttgatcagttctggcctctccaaaagaattttggccgaccacagatcgtcatgtaaatcacagcccatccgctcaagctcggttgccatcgcgccgtctatgatcataaccgggtattcatttaatatttgtgtaatgggattcataggccttcctttctgactttactgaaaatatataaaaagggtaatggatgctattctctttgtcaatgaaccggcagaaaaaaggtgttcaggacgctgcccgaacaccttttgtttaggaaatgtgtttgcctttcgcacttttcgcgatgtctgaatactcccagcagtcgatcccgtcatcatcagggagcacatctctgtaaaagacggggtcctttccggctttcttttgccggacataatcgctcaaagcggcaaacgcttttttcgacagaaggaaaatcgcgattaagttcacgaccaccattaagcccatgaacaagtcagccatatcccacacaagctggactttggaaatacagccgaacagtaccattccgagcacgcagatgcggtaaatgaacagccattttttgttctggcttaaaaatccgatattggtttctccgtaataatagttgcccatcagagcgctgaagccgaacaaaagcattaagacggcaaggaaacctgacgcccatgcgccgacatgatcgctcaaggcggcctgagaaagcgcgatgccgctcagtcccggctggtgatacgcgtctgaaaataaaatgataagcgccgtgcttgtacaaatgacgagcgtatccgtcaggacgccgaatgcctgaatgagcccctgtttcaccgggtggctcgtcgtagctgtcgccgccgcgttcggagcgcttcccatacccgcttcatttgagaaaatcccgcgtcttacaccttgcatcaaggccgcacctaaagcgccgcccgctgcctgatcaatgccgaacgcattttttacgattagcgacagaacgccgggcaattgggtgatgttcgtcagaatgacaaagaaagcgacaccgatatataaaacggccaagacgactacgatgtattccgccattttcgcaattcgtttgacgccgccgaaaatcacgccgccgaaaaccacgattaaaataatgcccaatgtaagccggctggtgccgaatgcgttttgaaaggcgacgctgatcgtattggattgaacggaattaaaaacaaccccgaatgacagtgtgattaatacggcgaacagcgcgcccatccagcgtttcttcaggcccttttccatgtaataggccgggcccccgcggaatccgttttgatcttttactttataaatttgggccagcgtgctttcaacaaagcttgaagccgaaccgatgactgcgataatccacatccagaaaatagcgcccggaccgccgagtgagatcgcaatggcgattccggtaatattcccggttccgacacgcgccgccatactgatgcaaaatgcctgaaacggggaaatgctgttttttgtccgggcggccgcgccttccttcaaaacccggatcatttccttcagcatgcggacttgcagaccctttgatctgaacgtaaaaaacagtcccagagaaagaagcagtacgattaacagttttgaccataaaaaatcatttgccgagccgattacattttcaaggaattcctgcatccaatcacctcttggttcgtttgattaaaaaatactgagctcccactcctgtgcgatatgtttcagcagcatgccgccggtcaggctgttgccgtattcatcaatggccggaccgtaaatgccgatgccgcagccgttatgaaaaggctgttctcttctggcgcttgggggaaccaatgccataatgccgccggataccccgcttttggccgggacgccgacgaaagccgcatatttgcctgacgcattgtacattccgcacgtcagcatcagggctttggcgagtttcgcgacatctttcggaatgacctgttcccgtcggatcggatggtatccgtcatgcgcaagtatcaatccgattaaagcgatgtcctcggttgtaccctccatggcgcactgctttaaatacacttcaagcgtttcttccacatccgcctcgagaaagttcgtttcttttaaatagtaggcgagcgctcggttccgatgcgcggtctgccattcagaacggaagacctcctcgtgaatgtgtgggcgttttcctattaatttttcaaaaacggaaaagagatattctaatttatcatgcgccgtttcacccggaagcagcgaggcgacggtaatggcgccggcattgatcatcgggttgaagggcttcccgggtttatggatttcaagccggatgatagaattaaacgcatcacccgtcggttccacgtccacacgatccagcacgtaagaaatgcctctgttcatgcaggcggcaataaagctgatgacttttgagatgctctgcaatgtgaacgggacattccattcaccggcatgaatcattgagccatccggctctaatatgcaaatgcccagctgagagtcgttgatttctccgagggcgggtatataatttgcgctttttccattgacggaaaacggtcggtaatgctcgacccaatcttgtaaaagtgaagccagttcctctttttcaaggcgctctctgaccatatctttcataacattcctcctctattgcaagcctgtccgaagcggaaaccggtcttggaaaacgttttcaaaaatagcgtgttccatgttaatgtataatgacatctacagaatcatacaaaatacgacaaaatcattcttaaaataagccgatagatttataaatcagccggagcgtcccgtcattcgggtctaaagaaatttgcggactgtatcggtcttgttcaaaatagacagaagaaggaagtgattatgatcaggctcgactatttactgaaaaaagacggctatcttttcgcccttatgctgatcaccgtgccgctggcgggggaactgaaattttaccccctgaatgaggtatatcggatcagcttcggcgccccggcttttttcttttttctgctgctgcttcggcatgtgccggcagtattgtcagggctgttgacaggtgcagccgttgtggcattccggatcggcctggcgtgctggggaggagagcatgccggctttacggaggtttttttcagccaatatcccagtttctttttttactttacatatgcctgcttgttttatgtgctgaaggtcaggcttttttgggatcggccgctgatgatcgggtttctcggttttctcattgaaattgcgtccgatgtcgttgaaatgacggttcagttttccggcggccggcagattatgatgccggacaagctggcggatattgcggttatcgctgtttctcacacatttattgtgctgagttttttcaacgtgatgaagctgcacgaatctcaggtcagggaaaaacaaacgagaaagcagcatgagcatatgctgatgattgtgtctaacttatatgaagaaacgattcatttgaaaaaaacgctgaaaacgacggagcatgtgacgaaagaatcctatcagctatatcgggaaatgagcgggaacgaccgggagctcgggagccgaatgctgcgacttgcgggagaaattcatgaagtgaaaaaagacaatcagcgaatattcgccggtttgtcgaagctgatttccaatgagagattccgggattacatgaatgccgccgctctggtcggcatcgtcatccgaatcaatgaaaaatacgccgaatctttaggaaaggacattcaattccggagcgtgattgaaggagagcatcccgattatcacgtctttaccgtcttgtcgattttaaataacctgaccgccaatgccgtcgaagccatgggtgacaggggtgagatccgcctcgcgctgcgcagggcggagggggagatggccgaatttcaggcggaagatgacggtcccggcattccggaaaaaatcggagaggtcgtttatgatcccgggtttacatccaaatacgatgaattcggcacaccttcaacgggcatcgggcttacttacgtgaaggaaatcgtaactgaacttgacggagacatttcctttcataacaagccaaaaggcgtcatatttacgattaaactgccggtgaagcatttgattgcagaaaggatgaactcataatatgcgtttttttatagctgatgatgaccgggcgatccgttccattttaaaacagatgatcgaggacgaggatttaggcgaagtcgtcggtgaggcagaggacggaagccagattgaagggcattatctccattttaaacaagtcgatattttattaattgatctgctgatgccgggtcgggacgggattgagacgatccggcatcttcaggggtcgtacaacggaaaagcggtgatgatatcgcaggtggaggcaaaggaaatggtgggagaagcttattctctcggcatcgaatactttatccacaaaccgatcaacaaaatcgagattgtcaccgttttgcgaaaagtaaaagagcggattgaactggaaacctcgatcggcgacatccaacactcgttaagccgtcttattcagcggaatgagccaaaaaaaagcgggccgggggggatgcacgagaaatcaatcaaagaaacaggaaaatttcttttatcggaattaggcatcgtgggagaaagcggggcgcatgacctcatggccgtccttcactatttatttgaggatgaacaggcggaaagaaacatcccgtctttaaagcagatgtttacaaacgtcgccatccggaagctggggcctgcggcggcacaagccgaggttaacagggaaatcaaagcctcggaacagcggatcagaagggccgtcattcattcgttaaaccatttcgcttcattgggcacaactgatttttcaaaccccaaatttgaatattacgcctcgaaattctttgatttccccgctgtcagcaagagaatgaaagaaatgcaggctaaggaaaccgtgccgctttctcgggttaaagtgaatatgaaaaaattcattcacgtcttctttttggaggcgaaagatttacgcgaaggatcaaaatttgtcagcggaggcagccggtaagctggcattggaaaagatggcaaacgtggataaatgacagctcgtactggcttgattttttccgcgctgatccatggcttgcaccctccgcatatttttgtaaacgaaaatcagcatgtgacagaatggcaggccgcttaccctgtggaaacggcgaagttcgcgcttcagacggggcaagaggagcatatgcaaatggcgcgggacatgctcggcctgaccgatccgaaaggttattgacttccgccggatgacagcgtatgatacattttaaaataaaagaacggatgaacaatgctgaggaagagtaagtacgcatcagcgcgcggggttcagagagtcggtggccgctgtgaaccgatccccgtccggtgccgaatgggcttctgaattgctgcgctgaaatgacagtaggcggtgccgggattctttccccgttatcaagaaaggagtattgaaaccgtgtgtttctgtactttttgagagaatggcttatcagccgttaataaaggtggcaccgcgaaaacctcgtcctttgatggacggggtttttttgtattgttaaggaggtgatggccatggaaagtgactggagacgggcagacaatcaaaaaaggagggatattcatggtgatcgcaaccgacgatcttgagctcacgtgtccgcattgtgaaggaaccggcgaggagaaggaagggacgccctgtccgaagtgcggcgcgaagggcgtcatattgaccgctcaaggaaacacgctgctgcattttatcagaaagcatattgatcagtgaaatcaaacgaaaaaggccgttatccggccttcatgctgtcgagaaaatctcgacagcctttatttttcccttgtcataaaataaaagaaagactgaaaaaaacggtttctttctcatgttccacacaagaaatttttctcaaaacagagccgaattcgttctgtttgaccaactcgtcgaagaggatcaccttcttcgaaaaattgataaatacatagacttctctttcattgttgaaaaggtcaagccttactgcaacgaaaataaagaccgcccctcacttgatccgctgaccttattcaaaatgatgttgaagattgccacatacccagccaagcaaagctaggcatgtgggagtgctttttctgcacctgaaatcaaatgaatatgtaaagaaacagcacaaaacaaaaaagcttgcagaaaaaacatcgttttctctacaagctgctttttcattcttcaaaataaggattcacatggatgagcacttcttcaacatctgaaaagtgtctttggatttcatttcggatttcgcgggcaatatcgtgtccctgcttaatcgtcaaatcatgatccaaagataaccggacatcaagcaatttatagtggccgtgttctcttgctcggattttatcgagccgtttgacttgagggcagtgcaaaataacggctttatattcctctatcagttcgggatcaacacttttttccatgagaacgtcaacagacggcctgattaattccattgaaatcttaaaaatgaggtacgccacgatgacactggcaattgcatcggcgtacaacagataggaccatccgcgtgtgttcccgataatcgccaataggacgccgataaaagcggcaagagaggcaacgatatcgcctttatgatcgtatgcaatcgctataatcgctttactgttccatttttccccttgtttgatcgaataacgatataagatctgcttagccgcgtaggatatcagagccgcaaacaatgcgctgtattgcgggatgcttggaccttcaacaaaggacgaaatcgcttctatcagaatatacacggaaacgagcactaatatgattcctacaatcgcttcgctgatgacctcagctttgccatgcccgaaaggatggtcttgatcgggcggcttattagaaatgccgatgacggccaggacagcaattgaagccacgacatccgctgcagaatgtataccgtcggcaaaaactgcttcactatcgcctatcagtccaaaaaagatctttcctgccattaagatcagattggctatcaatgcaatcaaagcaacttttttgcttatttgttctctttcacttgtcattttttcctcctataaaactgcacaaaaaaatagaggcgcttttgattcgctctccgtatcctttcttgtgtaatcactttgcttatcgtaccaattcagtttcgagtgggtctatagcaaggttttttcctgtttactaataaataaggtgacagaaaaaaagttggagcagggctaaacagtacacagacaaaatggggctgaattaaaaaaagaactgttgacatttgagtatttatcttttattattatctcgaattcaagattttttaattcaagataatttaattagagtgcaggataagaacctgctgatcgtttgaatcacgaaaagatcagtgaagagaacgtttcgttttttgatcatatgttatttggttttttatactataatatctcgaattcgagataaagggggtacgagagaaatggctgaatttgtacagctagtgaatgaaagaagatctgcaagcaattttcttccagaacatccaatcacaagagatgaactcaacgaaatgtttgaattggttgcgttggctccatcagcttttaatttgcagcacacaaaatatgtgacggttcttgacccggatgtaaaagaaaagctgaagcaggccgcaaacggacaatataaagtgtttagctcatcagctgttcttttggttttaggggataagcaggcatatcagcaagcggctgacatctatgaaggattgaagatgctgggggtattaaataaacaagagtatgatcacatggttcaagacaccgtttcgttttatgaaaacaggggagaaccatttaagagagatgaggcgataagaaatgcttcactttctgcgatgatgtttatgctgagtgctaaggaaaaaggctgggacacctgtccgatgatagggtttgatgctgaagccgtgaaacagattttgaatatagatgatcaatttgaggtcgtcatgatgattacaatcgggaaagaaaaaatagaaagcagaaggccgcgcggctaccgaaagcctgtgaatgagtttgtggagtatatttaactatttgtaaaggagcgaataaaaatggcgaaaaaaacgatgggcatccatcatattacggcgattgtcggtcaccctcaagagaatgctgatttctacgctggagtgctggggctgcgattggtcaagcaaacggtcaattttgatgatccgggtacgtatcacctttattttggggatgaaggcgggaagccgggaacaatcatcacattctttccatgggcgggcgcccgccaaggcatcattggagacggacaggttggcgtgacatcttacgccgtgccgaagggtgccgtggcgttttgggaaaagagacttgaaaagttcaacattccatacacaaaaattgagcgttttggagaacagtatatagaatttgatgacccgcacggtctgcacttagaaatcgtggaaagagaagaaggagaagccaatacgtggacgttcggagacgtaaccccggatgttgccattaaaggctttggcggtgcgaccctgttatcagcacagcctgaaaaaacaggtaaactgctggaaaacatcatgggacttgagcgagtcggtaaagaaggcgacttcgttcgttatcgttctgccggtgatatcggaaatgtgattgatcttaaattaacgcctatcggccgcgggcaaatgggtgtcggcacggtccatcacatcgcttggcgggctcaggatgacgaagatcaattagattggcaaaggttcattgctgcgcacggatatggtgtgactcctgttcaggatagaaactattttaatgcggtttacttcagagaacatggggaaatcttatttgagatcgcaactgatccgcctggctttgcccatgatgagtcacaagaaacaatgggcggaaaactgatgctccctgagcagtatgaaccgcaccgggcacaaattgaacaagggctgctgccgtttgaagtgagagaattagattgattgatagatgaacgtgaagcatgaagaaaaataacaagacatacatttaacagatgtttgctggaagcgactgttggtaaacagctgccttgcagacatcatataatatgaaaaataaggagagataaaaatggaagatgcaggactattacttattcgaatcatgattggtgtggtgtttctgttttatggatcacaaaaattattcggctggtttggcggatacggaattaaaggaaccggacaatggttcgagtcaattggagttaaaccaggcaatgccgcggccgctttatcaggtctcggggaactcgcaagcggaattctatttattttaggtgttttcctcccgctcggagctgctattataacgattattatgttaggtgccatcgtaaaagtccatggagcgaaaggatttgccaacggtgccggcggttttgaatataacttggtgctgattgcagtctccatcggagttgcactcatcggttcaggggcgtacgctttgcatttttaatataagtatctaagaacagttactgaaaagcggtaactgttcttttattttttaagcaaaacgttcaggtgctctgaatatcaaaaaagcggatatgatcaatataaatgtgtatagtgaatgtacgagtattgatgagcttggtcatgaaagacgagccgatttgaaggaggattttgatgaaagagctgacagacttacattcattagattctatcgagaattttattaagcagcatcaattcagttttatctacatttcaagacccgcctgtacagtatgtcacgctgttctgccgcagctcagaaaagtattggatcagtttccgaatatcaaattggggcatatcaatgctgacgaggtagaagaggtggccggcagattttcagtcttcactgttcccgtgcttcttttgttcattgatgggactgagtttctgagagaagcccgctttgttcattttgaacagctcgaagaaaggctgaaaagggtttatcagttatatcaagatgtataaagcgtttatactttacaaataaaaagccccctttaaaggggcttttatccggccttttttacgttattcggaccggggttctaaaaaacgggacccgcccaagtcttttctcatcagatagatatggaaaaaatattctccgacggcgatgatgacggcggaaataagagcggcaaacgccagtcttcctccggaaatgcccatggacagcggcattcccatcagccagacaacaagaaacgcgattccgaaatcagcggatgccgccgtgatattattccatctcggaagcacgtacaggtcgcccgtaaagtaagaaacggctcccagcacaatggtcatcagcagcacgtcgccgaatgtaaagcgaaaacctaagccgagtatcagatacagaataatgatggtcataatgcctttaatggcaagcgctttaatgtgttccatgcgaattcctccttatggaaatcatgttagtatgtttcctcataacgtgaaatataaacccttttttcgtgaacatttgttttctggcttttgtctgtcatcactgggccgcggctgaatatgatgaagggagaaaatacgggaggtgtcatgatggcagtcgtaaaagcgtcgagcgccgatctggatctaatggcaaggctgctcagggcggaagcggaaggcgaagggaagcagggaatgcttttggtcggcaatgtgggaatcaatcgggtgcgggcgaattgttctgattttaaaggcctgcgcaccatcaggcagatggtgtttcagccgcacgcgtttgaagcggtgactcacggatacttttaccagagaccgcgtgaatccgagcggaggcttgcccgccggacgattaacggagaacggttttggccggctaagttcagtttgtggtattttaagccgccgggaaactgcccgccgacttggtatgatcagccgtttgtcgcgagattcaaatcccactgcttctatcagccgacaggtgaaacgtgcgaaaacgtgtacaatacattttaatcccgggcgcaccgttctgagaatgaacggtgtttttttaattttttgtgaagaaaaacaggaaaaaagttcgcttgacggatgacaagccaaaaagaaacagagggggttttctcccggcggggcaaggtttgtcgaaacaatgtgaaaaatgtctcccgccgtccatttttcagccttacaaacccttcacagttcttcatagcggtttaacatttcttttttataataagggcgatcaatgagacgaaaggggaactgacatgacacatgacggccgtttagatgaatggatcaaggaattggagaacaaaagctttcagaacaatacgtttgaccgccgcgcatttatacagggcgccggtaaaatcgccggtctttccctcgggttagcgatcgcgcaatccatcggcgcgtttgaagtgaatgccgctccgaaattttcaaactatccgttcaccctcggcgtagcttccggcgacccgctgtctgacagcgtcattctctggacgcgtcttgcccctgacccgctgaatgggggcggcatgccgaagcaggccgtgccggtaaaatgggaaatcgccgctgatgaacattttcgtcacatcgtcaaacgcggaacggaaatggccaagccgaatctcggacactccgtccatgtcgaggcggacgggctcaagcccaataaagtgtactattaccggtttaaaagcgggcatgagctcagtcccgtcggccggacgaaaacgctgcccgctcccggcgctgacgtatccgccatgacgtttgcatttgcctcatgccagcagtatgaacacggctattatacggcatataaacatatggcgaaggaaaagcttgatctcgtattccatctcggagattacatttatgaatacggaccgaacgaatatgtgtcaaaaacgggaaatgtcaggacgcacagcagcgctgaagtgtatacactgtcagattaccgcaaccgtcatgcccaataccgctctgatgccaatctgaaagccgcccacgccgcatttccgtgggtcgtgacgtgggacgatcatgaggtggaaaacaattatgccaatgttatccctgaaaaaggccaatccgttgaagcgtttgtgctcaggagggccgcagcttaccaggcttattatgaacacatgccgctcaggcgaatgtcattgccgaacggtcctgatatgcggctgtacaggcaattttcttatggcaatttagcatcgttcaatgtgcttgatacaagacagtacagagatgatcaggccaacggcgacgggaataagccgccttctgatgagtggagtgatccgaagcgtacattgatggggacagaacaggagcaatggctcttcggaaatttagccgcctcaaaagcgaagtggaatgtgctggcgcagcaaatctttttcgcgcaatggaatttcggaacaaccgccaatccgatatacagcatggattcatgggacggctacccggctcagcgggagcgggtcatcaattttataaaaagcaaaaacctgaacaatgtcatcgtgctgacgggtgatgttcacgcaagctgggcgtcaaacctgcataccgattttaatcaaacgaattcaaagattttcggagccgaattcgtcgggacctccattacatctggaggaaacggggcggataaacgggccgatacggatcagatcttaaaacaaaacccgcatattaagtttttcaacgattaccgcggctatgtccgctgtacggtgacccctgcccaatggagagcggattacagagtggtgccgtacgtgacggagccgggggctgaggtatccacgcgggcttcattcatttatcagaaagaccagacggggattcggaaggtctctcaagctgcggttgcaggcggtgtaaagcagtcaaaagaggtggaagaggatcgtttcttcgcccataacaatgcgcatgaaaagcaaatgagaaagaaacgggccaaaatctcacaataaggaggcacactcatgttttctaatatcggcattcccgggttgatcctgatcttcgtcatcgctctcatcattttcgggccttcaaagcttccggaaatcggccgtgccgccggccgcacgctgcttgaatttaaaagcgccgcaaaaacactggtctcaaatgaagagccggacaagcagacggctgagaaagacaaaacggcaggctgaatcctgacatgggggcagacgaatccgcttctgcctctttctctataaggaggatgtacgattggataaaaaagaaacccacttgatcgggcatttagaggagattcggcagcgtctcattaaaaccgttatcgcctttctcgtgttttttatcggcgcctgctggtttgtgcaggatatttatgactggctgatcaaggatttggatggcaggctggccgttttagggccgagtgagattttatgggtgtatatgatgattgcgggaatatgcgcccttacggcaacgattccggttgccgcttttcagctctggcgttttacggcgccggctttgaccccgtttgaacgccgcgccgctttgctttacattccggggctttcggttttgtttattatcggaatttccttcgggtattttgtgctgtttccgattgtgctcggctttttaacacaattatccgccggccattttgacatggtatttacggcggacaagtattttacctttatgctgaatcttacattgccgttcggatttttgtttgaaatgcctctggccgtcatgtttctgacacggctcggaatcgtgaatccaacccggctggcaaaggcgcggaagctttcgtattttgtgctgatcgtcgtctcggtgctgattacgcctccggattttatgtctgactttctcgtcatgattccgctgctcgtcctctatgaaatcagtgtgacgctgtcccgcatcgtttaccggaagaaatgggccgaggcgccgtctgcagcttagtgaagttcgcctccgccggtctcagtatcgtcctcatgcgccgcggcggtcaccgcggcgattttgagcgcttttgtcacgagatccaggctgaggctcggcgcagacttctgcaaggtttgctccggaatgtacgggatgtgtataaacccgccgcggatgtgcggatgatggcggctgatttcatccatcagcccgtaaaagagatgattgcatacaaacgtccccgccgtgtaggatacagccgcgggaatgccttcctttttgatttcctcaacgatccgtttgatcggaaggccggtccaataggccgcgggaccgtcttgagaaatgttttccccgacaggctggtttccttcgttatccggtatgcgcgcctcattgagattgatcgcgacccgttccggcgtgatctgcattctgccgcctgcctgtccgacacagatgataatgtcaggctgatgctttttgatcgcctcgcgcagcacggcaagagacttataaaaaacggtcggcacttgttcagatacgatagaggcagggccatcagcggcaccattcagccgtttgaccgcttcccatgaaggattgaccgtttccccgccgaaggggtcaaagcctgtcagcaatacttttttctccatataaaaccctccttttctttttaccatactctataatggacatatattcctgccgaagggggaaacacgtcttgaactcgcctctggtgcaataccgatctttatttccggcgctccgcacacatacgatgctcgccagctgctctcaaagcgctcttgccctgccggtttcaaaagcgatcaatgactatcaggaaagcctgcttcagcatggcggaaactgggaagaagccattggacgaacggagcgggcaaggtgtgaatttgcgaaattgatcggcgcccatcctgaagaaatcgccgttttaccttcagtaacggctgctgtctctgccgccgtttctgctttaccggattgccgaaagaaacaggcggtgtatacggaattggattttccggcgatcgcccacattttgaaggcacagactgagatggagctttcagtcgtgccgtctgaagatggaatgatcccgttagagcggtatgagacgtacatatcggaacagacgcttttcacctgtgtgccccatgtgtcctatacgtccggttttgtccaggatatgaagcgcattgccgagatatccgcaaagaagggatcgcttctttttgtcgatgcttatcaatcagcggggcacatcccgattgatgtaaaagaatggggagttgatatgctggccgcgggtgcgagaaagtatatgctcggcataccgggaacggcgtttctttatgtcagaaaggaacttgccgaacggctgaagccgaaagtcaccggatggttcgggcagcagcgggcgtcgatgctggatttaacccgtttttcttatgcggacggagccaaacgctttgagaccggaaccccggcatttatcagcatatatgcggcacaggcggcattatctctattaaatgatgccggcacagaccgcattcaccgggaagtaaaaaaactcagcacatttgcgtatgaatacgcttctgaaaaagggttgcacctcacagggcctccgtctgccgatgacagacccggcatgatttccatacgggatgaaaaagcggcggaaacggctgcgctgttgaggcggaaaaacatcgtatgcgcacccagcggacatatcatccggctggcgcctcatttctataacacggctgacgatctgatctatgcgattgatgaactggctgaagcgcgcggtatataaaaaaacagcagactcacggggagcctgctgttttcttatgagtgattcactttgacccgtttcataaagaaggcgctgatcaaaccgatagcggcgacaatcatcgcgaagataaaggcgtgctggacgcccgcaatcagcgcgtgagagtatgcggaaggatcattcgggtttttcacggtgctcatataattcttctgcccggctgccatgatgctgaccgccaccgcagtgccgattgcgccggccatctgctggagcgtattcataatggccgttccgtccgggtaaaattccggcggcagctggtttaagccattcgtttgcgccggcatcatgatcatggaaatgccgatcatcaggcatgtgtggagcacgacgatgagaatggccgttgaagtgccggtaatgtttgagaaaaaccaaagtacggcggccgtgatgacaaacccgggaatgacaagccacttcggtccgtatttgtcaaacaggcgccccgtcaccggagacataaagccgtttaaaataccgcccggcaacaggatgagcccggacgtaaacgccgtcagcatcagtccgctttgtaaatacattggcaatagaagcattgtcgataagataaccatcatacagataaacacaatcacgacaccgagaacaaacatcggatagcggaaagcgcgcagattcatcatcggctgcttcattgtcagctgcctgatggaaaataagatgagcgcgatcgcaccgacagtgagcgaaccgataaccgtcgggcttgaccagccgtctgatccttcgcccgcattgctgaatccgaagacgatgccgccaaacccgatcgtagacagaataatggaaagcacgtcaattttcggttttgtaatgtcagacacgttctgcatgtaggcgatgccgaataaaagagccaacacaagaaacggcagggaaatccagaaaatccaatgccagttcaaatgctctaacacgagccctgaaaatgtcggaccgatcgcaggagcgaacatgatgacaagcccgatcgtccccatcgccgctccgcgcttatgcggcggaaagatgacgaggattgtattaaacatcagcggcagcagcagcccggttcctaaagcctgcacgattctcgccgccaaaagaaacggaaagctcggcgcaagcgctgcaatcagcgtgccgataatggaaaaagcaagtgaaacgataaacagctgtctcgtcgtaaaccattgcaaaagcagacccgataccgggacaagaataccgagaacgagcagatagcccgtcgtcagccactggacggtcgcaggagtgatatgtaactccttcatcaggtcagtcagggcgatattcagcgccgtttcactgaacatgccgataaaccctgccgtcagtaaagaaatcatgatcggcatgactttatattgtttggaaggctgagcgttttccaaaatcattctcctctctttctatacgtacatgtctctcgtattttatgtcttcagcaggttcgggatttgtttagaaatatggaggatcggcattttgtcttttttggctaaggacacaatgatgccgccttctatcatggcatttaaaacagtgctgatttccgccgctttctcatcagaaaaaccggctgatctcaatttgcccgcgaacagattctcccattcctgataagcgctttgacaggcctgctggagcttttcgctctttaaagcagtctcggcagccagtaaaccgacaggaaacccttcaaagttctccggacatgtgaattggcttgataagtcctgtaaaaacgcttgaatgctttccgcaggatcaggatgggcatcaaggctttcttttattttcatacggatataatggctcatttcattgacagcctcaatggcgagctgctctttgccgtccggaaaatgatagtaaagagaacctttcggcgcaccgctttctttaataatctgattcagccccgtgccgtaatacccctgaagctgaaacagcctggttgccgcggcgaggattttttcacgagaatctccatagctcataatgttcccaccttactgatttttgacaaatttaaaatatagtgactggtctattatcttgatttcacatgacggtgtcaaggttttttaacggttattttcttcgggaggttgcctgacaagcgcgttgaccggtgcgaggaaaatcttcataaataaagaaaaggagagaaaagaatgaaaaaacaatttatgcccttcattacatttatcacggctctgctcttcatcgcggccggctgctcccaatctcctcaagcgaaagaaacaccgccccggatggcagccgcagccccagcgaaaaaagacggacttccgaatgttaaaattcttgccaccggcggcacaattgcaggcgctgctccttcaaagacgtccgctacggagtacacggcgggggcaatcggagttgatgccctgattcaggccgttccggagataaaagaggtcgcgcatgtgagcggagaacaggttgtgaatatcggcagccagaatatgaataacgagacactgctgaaacttgcaaaacgggtaaacaagctgctcaagtctgatgatacagacggcattgtcattacacatggaacagacacacttgaggaaaccgcctactttctcaatctgacggtcaaaagtgacaagcccgttgttgtcgccgggtcaatgaggccgtccacggcgatcggagcggacgggccgtccaacttatataacgctgtaaaaacagcggctgcgcctgatgcgaaaggcaaggggacgcttgtcgtattaaatgacagaatcgcttcggcgcgctatgtgacaaaaaccaatacaaccgcggccgacacattcaaatcggaagaaatgggttatatcggaacaattgctgatgacatctattttaataacatcatgacccgaaagcatacgaaggatacagatttcaagatagataaacttgataaactgccgcaggtcgatattatatacggctatcaaaatgacggaagctatctctttgaagctgccgtaaaatcaggggcgcaaggcattatttttgcaggctcgggaaacggctcaatgtctgatgcggcgcaaaaaggcgccgtaaagtcggtcaaaagcgggctggcggtcgtccgctccacaaggacgggaaacggaacggtaacacctaatcgagagtatgaaaaagaccatttgacagcttcaaactctctcaaccctcaaaaagcgcggattcttctgatgcttgcgctgacaaaaacgcatgaccctaagcggattcaaacctatttcaatgagtactaggagaagagaactgggtgttctctccttttttgttatgccgtattaaagcataagcgtgctttcgggaaaggggcgtctttctcatttttccgctctttttttaattgttgaaaacagtaaaaaatacactattttttccttttcttctctaatagaatgaaaactgcaaaaatattacatagcaggaggaaagttcatgaaacatataaaaaacaaaattctagttgtccttacagtttgtatgctgtccgtcatttccgtatttgccttccagccgaccgtatcgaaagcctcctcagggcataaccccgttgtcatggtccacggaatcggcggggcgtcctttaacttcgcgggaatcaaaacatacttggcatcccaaggctggtcaagaaaagagatgtacgccatcgatttcttagacaaaaccggaaacaacagacacaatgcgccgagactgtccaattacgtgaaaaaagtgctcagcgaaacaggtgcgaaaaaagtcgatatcgtcgcgcacagcatgggcggagccaacacgctctattacattaaaaatcttgacggcggagacaaaatcgcaaacgtcgtcacactcggcggagcgaacggccttgtgaccaaccgggcgcttccggggactgatccgaaccaaaagattttatatacatcgatttacagctcagcggacttaatcgtcctgaacccgctgtcacggctgatcggcgggaaaaacgtgcagattcacggtgtcggacacatcggacttttgatgaacagccaagtaaacgggctgattaaagaaggtctgaacggcggcggacaaaatacaaattaacagtttcaaagccccggagaatgagaatatcccggggtctttttttcttccatattcttttttcgccgtaaaccaagccctctgaagttatttttgttaaaataataaagttatatcagaattcggagggtttattgtgggaaaagtgaaaagaaatgccccttgcccatgcggcagcgggaagaaatataaaaaatgctgcggaagcaaagaagctgccattccggcagacatcgcggcaaaagaagcgaaacagattcaggaaagcctaatggagtacgcctttacagcacatagagacggcatatcatcatttattaaccagcacgggttcattacggagctggacagacagacaaaagacatcggagtcttcaacctcggcatctggggaattttcttccgtccgctggcaggcagcaagacgatttttgaagaatatcttcagaaaaaagccggcggcatcaaccgcccgaaaacacgggaaatcgttgaatcatggaaaagcatgacacctgccgttatggtgcttgaagatgtgaaagaaggaatgattcactttgaagatgtgatgacgaaaaaacaattcaaagtggaaatggacgtcagccagcaggatcttccgccggcgggaagcctgattctcggctatccgatccacgaagcggaaaaagcggagttcttcatgcaatttacgatcttccctgtgaagcggaccgaagctctaatcagcaaagtgaaaaaggcggcggccccggctcttgcggaaggaaaatcgcctgagcgctttatgcaggaaaacttcgacattgtgctggccgctcttttaggaacggcggaagagcctgagcaggcagctgaagaaaaacagacagaatgggccaacgacatggagaaggaaacggcagacgccattgaaaaaggcctgagcggggatgaatacccggctgagctggttccggccgtaattgatctgtggaaaacgttctgtgtcaaaaaaacaccgacgatcagaaagcctgaagctttcgcggcggcggtcgaatattacgtaaacagcatttctctgaacggcgcgtccgtttctcaagccaagctggcgaagaagtacggcgtcagcgcctcaacgatttccagccgctataaggaaatcgagggtgctctcacggatgaagccgaacgcttcgccgcagctctgacatcttaatacacagccaaaaaaaccttgaagggcaaacgcttttcaaggttttttctgtagagaggctctcaggcaggataattcttaccgtctatctaatactaaacagagcgataaaaggaagggagcctgagccatggatgagacacgtacgctgggcaggacggatttacgggtaaagcgtatcggttttggcgcaaatgcggtcggaggacataatctgtttccgaatcttaatgatgaaacgggaaaagaactcatccgcacagcattggacggcggcgtcaattttattgatacggcgtttatatacggtttggggcgttccgaagagttaatcggtgaagttgtcgcagagcgcggcgtgcgggacagcctcgtgattgcgtcaaaaggcgcgcataaagaagtcaacggacaaatcgagctggacaacagccgtgaatttctccggagtgaggcggaaaacagcctgaagcggctgaaaacagacgtgattgatttgtattacgtccacttccctgacggcaaaacaccgctctccgaagtggcgggcacgctaaaagaactgaaggacgaagggaaaatcagagcaatcggcgcgtccaatctcagcttccggcaattgcaggagtttaacgccgacggctatttagaggtttttcaatcggaatattcactgattcagcgtgaggcggagcatgatctgctgccttattgtgaaaagaacggcatctcctttattccttatttcccgcttgcttccggcttgctgacgggaaagtttacaaaagacacagtctttgaggacagccgaaagaacaggccgccgtttcagggagaagcttttcaccaaaatctggagcgagtggataagcttcgggccgttgcggaggaaaaaggggcgcagacagcgcatatcgcactcgcatggcttctgtcgcagccggcggtggatgcgatcattcccggagccaaacgccccgtccagctgaaacacaatctggacgcgcttaatgtgcagttaaccgaggatgaggttcaatatatcagtgacatctttaagtgaaaataaaaaaaggaaatagcctgcgctatttcctttcttgttgtcaggacgttttcaaaaacgcttctgtcaatccttccagatcggcgtctgtatccagataccactggccgcgggcgtttttcttcatctcaatttctcttgtaacagaagaagaagccggtttcaggcgtataaactcttccggatagacagaaagcaggtggctgacaatttcgttttcatcagcatcagggtgctttccggcatagtcttgcacgcggtcttgcagctggcccgcaagcggagacatatcaagcggcgtcacttttgcttcaaggacggcttttttgcctgacatggatttggtatgcaccttgagctctgtgttatcccgaagcgctgatgacatggcgtcaataatagcggaaatggcttttgaatccgcctgttcttgtgaaatgcctgcagaagcgataaagctggctttcgccgattcctgatatgcggcggccgtcattttttcatttacaccggtcaggcgggtgaaatctttattgtgcttgccgtacagcatcacatcaatgtatgcggataatgcgtccgctgggtcaggttttgcgttggaggctgtgcctttgactttcagtttataagataaaggcttcgcgtcttttgcctgcggctgatataccaattcataggatttgccttcgtcagccgtgaagtacagattgcccgtcactgtcttacccgcatgaagcgtgccgctctgcatcaagtcttccttatcggccttggctgttttcgcgtcatcctgataaagcgagaagtcgctgcttttgacggtaagcgggtctttgcccgtatttttgacggtgaccgttactttcagcgcggccggatgttcagtatcgtctgaagcggcccatgccgtctcttttattttcactttcgccgtgctgctttcctggccgccgctcgtttcgctgctgcacgcggcggtaaatgccgtgagaagcagaatgaaaaacacggcgctcatttttttgatggacatctggtttaccccctgttgttaatgattaattcgatagtcatgaagacagacaggttaattatactagttttgtataaaagagtcttggtaatcatcaatctttttggaagaaaaggaagtgttatgatgaataaagaagaattgaaacagctggctctccgaatcggaaacgtacctgcccgctacgagagtaatgtggaagaataccgggaagatgaggttctgttttggtgggaagataagaatgatccggaagccggcatcatggtcgaattagaccgggacggaaaactgaaatacttatcccgtccggctttccagactgatctgccggctctttcggaatcggacataaaaaaaacgatgcgggcgtttttagaaacccatcgtcctggggcattggctgagttcgaattggaaaacagcggctccgccaatgatggcgatgtgagatattcctatgttcagatggctgacggtctgccgcttccgctgaccgggttttacatcgacctggctgtgacaggggaagtaaccggcttttcttaccatgggaaggccgatgatctgttaagaccggagacaattgcggacaagcgggaagcgttggctcactttgtcaaacatattgaagcagagctgttgttcaccgtcctgcatcagtccgtctatgtgcagggggatgacaagccccatctcgtctatcaaatcgtgtctccgacgcggccgatatcggccgacctgaaggaagagaatgcagaattagacgaatatgaagagctggaagacgacacgcggccgtatgtcccgatttcacgccctgcacctgaagcggaaaagatgagcatcaatgacatgatcgggctgcacgacggtttttataaagagagggaaagcgaccttggagagggccgtatcggcattgcctggcgtcctgaaaaaacaaaatccgcacgggaagataaaagctttgaaagtctgtttaaagaacggaatgaacacgtattgaaaacaatgcatgataaagaatcgggccggctcaccggggcgatgtcatttataaaggttgaaggcgaaccggtgttttccgaggaagaatgccatcacatggccatccgctttttattcgccatgtttccggaagcggatcagtatttccgggttcaatatgatgagccggatgatgaaggagaaaacgtgggacttacatataaggcttgttcgggcggcgttgatttgcgattcggagagggaagaatctgtgtcagcaaaaagacgagtcttgtcactttttatatgccgccggaaattgatccgaaagagctccaggaaatcgatcccgttccttcattgacaatggaagaggcgaaggacgcgatccgccgggccatcaaagccgagctcgcttgggatcgttgttacgatgacgacagctgcggaaaagtgtacaggctcgtatacaagccggttttcccgcggtttattgaggctcatacaggggaagcgatcacgagtttaataggctgaaggtcatgggcgttcgtcccggggctttcacggggaatgtgacatttgtatgaaaaagtgccgctctgaatacggctcttttccctctttgctaaaaatagacacataaaaggcactttcttccctttaaaaggataaggacgtttttatataataaaaaacagttcttttttatacactcttctgaaaggatgaccccattgctgaaagaacatctgagaaaaaaagcgctggaaatcgggaacataccgccggactatgagcttgaaatagaagattatgatgaaaaacaaaaaacgaaagcctattatatatggaaagatcgtaaccatccggataaaacggtcacgattgagctgggcgacgacggatctttgcttacctattcacgcaacgactgtccgagttcagacatgcagctgtcagacgccgaattaaagctgacggctcttcggtttgcggcgagacaccgcccgctaacttttatgaatttcatctttcaggcgagggaagaacgcaatgggtgcatccgatttatctatacaaaaaaagtgctcggccggccgcttcccgattcaggttttttcgttgatgtaaccaggagcggcttcgtcgtgcagtttatctattacggttataagggtgaagcgcccgttccggaaacattcgtcgatcgggaaaaagtcgtctcgcattacatgagtgtgctgacattcagtctcgtctatgatgtggtcaattttgagaaaataccgcgtctcgtctatgaaccgattctgccggcttacagctatccggccggtgaagatgatatcgtgccggatcagcagctttgcgaagacaggaatgagccggcaaaaccgcttcccgcgtttgaacataaacgggaaatcagcctggatgaattaatggggtttacctcggatatggttcagacgcgccggcgcgatctcggggatgagatcggaacgacatggcggaaagggtcggttccggaacggaaagatttgagtatcgaaagctattttgaaagcagcaacaaaaatacaatgaagatgaaaacggacaaaaagacagggaaaatgacagcctttaaatcttttattgagcatcagggcccggccttttattctgcggaagagtgtgaggccgtcgcgcttcaatttttatacaagctttatccgagagcggacgagttttttaaaatgaacccgctgaaaacggacggaaggggcaggttccgcttccatttttccatatggcatcaggatattccgctgcggttcggcgctgcgagaatacttgtcagtcccgtaacggggcttgtggaagcttacatggcgcctgacattgacccggagcagctggagaagatcaatccggtgccggccgttactcccgaagaagcaaaggccgcttttttatccgatttccatctgcggctggagtggcagcgcgattttacgccgtccggcaatgaaggatataagcttgtgtacaggcctgtctatcctccgtacattgatgcgcaaaagcgaaaaaagaaaaggttttattagccagggatcatttgtaaatgaggataatctttaaagcctctccaatcgcctccccaatcaaaaccgagcgttttggcaatcgatacgacctcaagccaatcgggcgtgccgtttcggtttccgtcgtacgtcatatcccaaatcaggcttccatcctttttttgcagggcgaagtcgatcgcaaggccgtaattgtggtaagattccccgccttttgcgtaggtgacgatatttcctttttttgaacgtccttgacggtacaattcgttttgttcctcaattgatctgaaaccctctgtgataacgacggtgatgccttttttcagagcggccgtctgcaatagctccgcattctgtttcacgagcggatgaagagcgcttggaatggctctgtcttgtaatgccgtctgcggcctcaattctttctgcacataggaaaaacataggtctgcggaaaagaagaggatcaaaagcagtgcaattctgactggtcgtttcatggtgaattctctctttctttaattgattaaaatctttgtttgctcactgccataaatttgctatgataaaatataacataattagtagccggaggaaggaggcaaatctatgaaatccaagattccatctgaagaagtggccgtaaagatgaatgaatggtataagctgatccgcgcgtttgaagccgatcaagctgaagcgctgaagcgggagattcaatatgaactcgaagatatggaagagaaccaggatttattgttgtatttttcattgatggaatttcggcaccgcatcatgctggataaattaaaacccatgaaagacggcgactgccagcctccgttctctgaaatgctcactgagattgagatgaaccagcaaaagctgaccggcttactggaatattatttttactatttcaggggaatgtatgaatttaagcagaaaaacttcatctcagcgatttctcattataagcgggctgaggaaaagcttgaatatgtggaagatgacatagagaaagccgagtttctgtataaaatttctgaggtgtactatcacatcaagcagactttcttttcgatgaattacgcggggcaggcgcttgatatttacaagaaatatgaattatacggaatgagaagggtgcagtgcaaatttatcattgccggaaatctgatggacgcccagcagcataaaaaagcgctggaatacctcgaatgcgccttggagcacgcggagcggcttgatgatcaatatatgattgctgcggcctattataatatcgggcactgtatgtacagtctgggtgacttttgcaaggcggcggaggattttgaacgggcggctgccggatttgaagcacacagcttccggcaggtcatccaggctgttttttcactcacgcatatctactttaaaacggaaaaatacagtgaagccgccgccagctgcgcgcggggcatgagaagcgcggcggagtgggaagatgagatctatatgacgaaattccgtctgattaaagagctttatcagggggaaggcggacaggattcactcaaagagtattttgacattctggaatcaaaagagctgttggctgacacagaggaactgcttcaggacgcggctcatttctttcataaacgggagaactacaaagcggcatcttattttttcagcaggcttgtcggcgtgcaaaaaaggctgcaaatgaacaactacgcataatgaaaaaaagaacgagggagcttcggcttcatcgttctttttatgatctcttttgttttcggccgatcaaaaccgggtacatgctctgtattaacatcagggaggaaatgagacaatgtatcaggatttacagggaaaaacagcaatcgtaacaggttcttcgaaaggaatcggaaaagccattgccgaacgcttcggcaaggagcggatgaatgtggttgtgaactacctcggtgattccgccggagcggaagaagcggcggacatcattgagaaagcgggaggccgagccgtcaccgtaaaagccgatgtatcctcagaagaagggattcaggcgctgtttgatgccgcccaggagcatttcgggggtgtggacgtgatggtcaacaattccggctttaacggggccgaagcgatgccccatgaaatgagcctggaggattggcaaagggtcatcgacgtcaacgtgaccggcacctttttgggggcgaaagcggcactgaaacatatgctcgagcgcggcaaaaaaggaactgtcttaaacatatcgagcgttcatcagcaaatcccgcgtcctgaaaacgtgcagtactcggcatccaaaggcgggatcaaaatgatgacggaaacgatggcgctcaattacgcagacaaaggcatccgggtgaatgccatcgctcccggcacgatcgccacggagtccaataaggatctggaagatgaaacacataaacaggcccagctgaaaaaaattccgatgaacgccttcggaaaaccggaagaagtcgccgcggccgccgcatggatggtgtcggaagaagcgagttacgtaaccggaacgacacttttcgtcgacggaggcatgacgctttatccgtctcagctggacagataaaagagagggggaaaccttctcttttttgtttagggaaggatcataaaggaaatggttctctaaaaaacaggagggccgcaagatgaatgactggtggaaagacgccgttgtctatcaaatctatccgcgaagctttcaagatacgaacggcgacggtataggcgacctgcgggggattatcgcgcgtctcgattatataaaagaacttggcgctgatgtgatatggatctgcccgatttacccgtcgccaaacgtcgataacggctacgatgtgacggatcatcaagcgattatggaatcttacggaacgatggaggactttcacgatctgcttacagaatgccgcagccgcggattaaagcttgtgatggatttcgtcttaaatcatacctccacggagcatccttggttcaaagaggcggaaatgaatccggacagcaaataccgcgattattatatttggcggccgggcaccgcggacggcccgccgaccgattgggtgtcggattacggacaatccgtctggcagtacgaagaacatacgggcgaatattacctgcatatgaacgccgtcaaacaagccgacctgaattgggaaaatcccgaggttcggcaatccgtgtacgagatgatgagattttggctcgataaaggcgtggacggattgcgaatagaccagctccatcttctgtcaaaaaaagaatacttgccgccatatgaagattacatcgcccgccgggccgatccgaagcctttccggccaaacggagcacggatacatgattacttaaaagaaatgacgaaagaggtattttccaaatatgacgtgatgtcggtcggcgaggccggatcagtgacgcctgaggaagggctggtctacacgggaaccgatgagcatgaactgaatatgatttttcattttcagcatatggagcttgatcaaaagccgggccaagagcattgggatgtaaaaccgcttgagctgtccgatttgaagaaagtgctcacagactggcaggaaaaactggaacatcaaggctggaatacgctgtattggtgcaatcatgaccagccccggatcgtatcccgtttcggagacgaaggcacataccgcaaagcatccgccaaaatgcttgccgctctgctttatttcatgaaaggcacgccgtacatttaccagggggaagaaatcggcatgacaaacgctccgtttgacagaatagaggattatcaagatattcagaccatcaatatgtatcataaaagggtatttgaaatgggccggaacagggaagaagtcatggcgtccattatggcgaaaagccgggaccatgcccgtacaccgatgcagtgggacggcagcaagaatgccggatttacggagggcgaaccgtggctcgcggtcaattccaattacaaaaccgtcaatgcggccgaggctcaggatgatcccgattctatattgaacttttacaaaaaactgatccgcctgcgaaaacagtatgctgatatcataaaaggcagctacacgctgctgcttcctgatgacccgcagctgttcgtgtatgaaagacaggcaaacggacaaaaactcatgtccatcagcaacgtatcgaaagaagaagccgctttttattggccggacggttccgaacctgaaagggccgagctgcttctcagcaactatgataatgacagcggcacggaatcccgcatcacattccgcccatacgaaacaagagtttatctgcttgcctgatatgtgataggactcccccgtccatacatggcgggggctttttaggtaaattggatattaatttagaaaaaaatatcttgcaaaacgtaattacttcgttttattatggtataggtaacaaatgaacgagaaagaacgctttggaaatcgtcatcattctgatttacagaacagggggaaacggcttgtttaaaaaatggagcggaatcattgtcattgcggcatgctttttaattgcggcgggctgcggcaattcatcttcaaaaggttcgtcaggttcttcaaaaagcggcaaactgcacgtcgtgacgaccttttatcctatgtacgaattcacgaaacaaattgtcaaagacaaaggcgatgtagacattctcatcccgtcttcggtcgaaccccatgattgggagccgacgccgaaggatatcgccggcattcaaaacgccgatcttttcgtatacaacagcgaatatatggagacatgggttccttcagcggaaaaaagcatgggctctgatcatgcgaagtttgtaaaggcgtcgaaaggaattgacttactcgaaggttcggatgaagaggaagaggaacatggacacggcggtcatgaccacagccacagcatggaccctcacgtgtggctcagcccggttcttgcgcaaaaagaggtcaaaaccattacggcgcagatcgtaaaacaggacccgaagaataaagaatactatgagaaaaatagtaaagaatatattgcaaaactgcaggatcttgataaactataccgtacaacattaaataaagcggcgaaaaaagaattgatcacacagcacgcggcattcagctatctcgccaaagaatacggcttaaaacaagtcgcgattgcaggcctttctcctgaagaagagccgagtgcggccaaactggcggatctcaaaacgtttgccaaaaagcatgatgtgaagatcatctactttgaagaagttgcatcgcctaaagttgcagatacgcttgccggtgaaatcggcgcgaaaacggaagtgctcaatacactggaaggtttaagccaaaaagaacgggataaaggcatcggttatatcgacattatggagaaaaaccttgatgcactgaaagattcgctattggttaaataacatagtgtgcgccgcggggtgcacactatttctatgcgggaaaggaaggtcagcatgaatctcgttacattacaggatatcgtttttggttattcgcatacacccgtgcttgacggcgtgtcgctggaaatcaaaagcggcgaattcgtcggcattacaggaccgaacggcgcgtcaaaatcgacgctgatgaaagtcatgctcggcatgctcagaccttgggaaggaacggccgagatcagtaaaaaaaacgcagccggaaaacgcctgacaatcggctatgttccgcagcagatttcttcatttaacgcaggattcccaagcacggttctggagcttgtgcaatcaggccgttatacgaagggaaaatggtttaaacgattgaacgaaacggatcaccacgaggtggaaaacgcgctgaagatggtggaaatgtgggatttccgccaccggaaaatcggcgatttatccggcggacagaagcagaaaatctgcattgcgagaatgcttgcgagcaatccggatctgctgatgcttgatgagccgacaaccgcggttgattatgaaagcaggcagggtttctacgaatttatgcaccatcaggtgaaaaatcacaaccgcaccgtcgtcatggtgacacacgaacaaaacgaagtacagcagtatctggataaagtcatacggcttgaaaggggggaaaaaggcggatggaaatgtttgacttggaattcatgcgacgagcttttctagcgggaagcatgatcggaattatggcgccgatattaggcgtatatctcgtgctgagaagacaggcgctgatggcggatacgctgtctcatatttcattgtcgggcgtggccatcggtttttttctcagtaccaatattacggcggcgagcatcgttgtcgtcacgatcggagcgatcggcattgaatacatgcggcgggcgtaccgtacatattccgaggtatctatcgcaatcttaatggcggccgggctgtcgtttgcgatgtttctgatcagcctgtcaaaaggcggcgcgtcgatgagcatcgatcaatatttatttggatcgcttgtcacggtcagccagcagcaggtctatattatcggaggcattaccctgctgattctgctttatttcattatattaaacagaccgctctatctgcttacttttgacgaggcgacggcgaagacatcaggcattaacacaaacctgctgtcaatgtcattcagcatcgtgacggggctggcgatttcggtcattattccgattatcggcgtgctgctcgtttccgcgctcctcgtactgcccgcggcttttgcaatccgtatcgccaaagggtttaaatgggtgtttgcggcagccattattatttctcttttcagtgtgttcatggggctgacgtcttcgtaccagctcggaacgcctccggggccgtcaatcactttactgttaatcattctgcttctgctcgggtttatgctgcaggggatttggaatgcgtttaaaaaaggaaaagaacgaaaaaaccgccgttaagcggtgcagcagtctcatctgctgctccgtttgacggctttttttacagaaatatatcagcaagacgctcatatgactctttttttgcttcgaaatcaaagacgttgcacagcaccatcatctcttttgtctgataccgctcggaaagttcaagcagacggcgtttcactgcggcaggagagccgatcaccatccgcttcctgttttcttctatctgtttacgatcctccggcgaatacggataagcctgcgcttcttccacactcggcacgcggctgtcggcgccttttccgacacgaagaagccataaatcctggcttaaggcgagttcttccgctttctcatccgtagccgcgcatatgacgaaaatggcacagagcgaggcgggagcggaaaaatgggcggaggcccggaaatggtcccgatagatctgaaaagctttttccccgcgttccggattaatgaaatggccgaagacatagcccgcaccttgaagagcggcgcgtctggcgctgttttccccgaggccgagcacccaaagctgcggggctgtttcaatcaaaggcgctgtttttattcctgcataagcatggtccgagggaaccgaatctgtcagaaaggatgataaatcctgaagctgcctgttgaactcggtcatgcttttctttaccccgtctgtgagggcgagccggattttcgttgtaccgcccggcgagcgtccgaccccaaggtcaatccggttcgggtgcagcgcctcaagctgacggaaagtttccgcgactttataagggctgtactgcggcagcagcacgccgcctgatccgacacggatggacgttgtggctgcggcggtatgagcgatcataatttccggcgaaacgcttgtgagccctcttgtgccgtgatgctcggcaaaccagtaccgcttatagccccatccttcactgaggcgggcgagctccgctgaacggcggagcgtctcgtgcggcccgtttcctttggatacgggcgcctgatcaagtatgcttaaatcaatcactcgtctgcccctttcctgacatgtattgatacaaggataggaaaaatgttcagtcttcgtcaatttctttgttttctctattctctccggaaagaaggagaatataggaagtaatttttcgccgtttttcgccaaaaattcttatgttttatgaaactttgatataataaaagacgtatatcttaataaacaccgggattcttgtcccggaatttagtaaaaatgcgcacttgcggcgtgcttagcggcacccttacagaataggagtgaatcatatggcgatctctttacaaaaaggacagcggattgatttaacaaaaggaaaagccggtctgtcaaaactgctggtcggactcggctgggaccctgtatcatccgggggctttttcggaaagctgttcggcggaggcggtgccaatatcgactgtgacgcttccgtactgatgcttgaaaatgataaaatgacagacagtaaaaacgtcatctatttcggcaatctgaaaagccgatgcggcggtgtcgtacacacgggtgacaacctgacgggagaaggcgacggcgatgatgaacaaattctcgtcgatttggcgaaagtccccgctcagattaataaacttgtgtttgtcgtcaatatttacgactgcgtcagacgaaaacaggacttcggcatgattcaaaacgcgtttatccgcgtcgttgatcaggctaaccgcgaagaactggtgacttacaatttaagagataactattcaggcagaacgagcctgatcgcggctgaaatctaccgcgaggacggcgagtggaaattcgctgcgataggtgaaggcacaaacgatacgaaaatcggcgatatcgttaaccgatacgcctaaacgaaaaaaaggagagtgcacacatggcaatttcattggcaaaaggacaaaaagtagatttgactaaaacaaatccgggtctttctaaagtcgttgtcggccttggctgggatacaaacaaatacgacggcggacatgattttgatttagattccagcgtctttctattaaatgaagcaggaaaatgcgcgtcgcctgatgatttcattttctataatcagcttgaaggcggaaacggctctgtcgcacattcaggcgacaacctgacaggccagggcgaaggcgatgacgaaagcgtaagagtcaacctgagcgcggtgcccgcggctattgacaaaatttcattcgtcatcacgattcatgaagcggaagcgcgcggccaaaacttcggacaagtttccaacgcgttcgtgcgcattgtcaatgaagaaacaaatgaagagctgatccgctacgatctggctgaagatttctcaattgaaacagccattatcgcaggggagctttacagacataacggcgaatggaaattttccgcgatcggctcaggctaccaaggcggactggcccgtattgcgacagattacggcctgcaaatcggctgaaccatatcaaacacagaagggagagacggcacatggctattcaattggcgaaaggacagcgtgttgatctgacaaaaacgaaccccggccttacaaaagcggtgatcggcttaggctgggatacgaacaagtactccggagggcatgactttgaccttgacgcgtcggcttttcttgtcgatgcccatgacaactgtgtaaatgatcttgattttgttttctacaataaccttgaacacccgagcgggggcgtcatccatacgggagacaaccggacgggcgagggcgagggagacgatgaacaaattatcgtcgacttctcaaaaatacccgcaaatattgaaaagatcggcatcaccgtcacgattcatgatgcggaagcgcgcggccaaaatttcggacaagtttcgaacgcgttcgtgcgcgtcgtcgatgaaaacagccagaatgaactgcttcgtttcgatttaggagaagacttctcgattgaaacggcggttgtcgtttgtgagctttaccgccatggggctgagtggaagtttaacgccatcggcagcgggttttccggcggtctggcatcactttgccggaattacggcttgcaggtgtaagcaggaaattaccgttttactaaataggaggaaaaaacttggattttctacatcatattatgtcgacctacgcttccttttttgattggaaaatgtggggtgaggtgctgactgaccctgtatcatgggggctgatcggttccttggttctgctggaagggctgctgtcggccgacaatgcgttagtgcttgcggtgatggtaaggcatctgcctgaaaaacagcggaagaaagcattaacatacggattgttcggggcatatattttccgttttatctttatcgggatcggaatgctgctcattaagttctggtggatcaaagtgcttggcgcgctgtacctggcttggctcgtcattaagcatttctggatcggagaaggtgatgacgatacggaaggcatgaagaaaaattcatggatggtccgtacgttcggaattttctgggccactgtcgtttcagttgagttaatggatttggccttctctgttgacagcattctggccgcgtttgcggtatcggaaaaagtgtgggtgctcttgatcggcggtatgcttggcattctcatgatgcgtacagtcgcaaaagtattccttgttttaattgataaaatccctgagcttgaaaatacggcttttgtgctgatcgggattatcgccgtgaaaatggcggcgagcgcctttgattatgaaatgccgcacgttgtgttcttcggaatcatcatcgctgcgtttgtggtaacgtttattatccactatttcaacaaacaaaagcaggttcaggagcaaacggctgcatctaaagaagaataaaacaaaaaaggagggagagttcatttccttccttttttgtaccgatcatcatgaagagaaaggaggaaaatgatgaggcaggaagaattggtgatccgaaaggcagagccggaaaacgatgactgggaaacgtttctgctgcggccgctgccggaacgtcccggttacgagcgggaaaacgggctggcgtttacccggcttgccgtccggattttgggcactccttatgatgagacggagtattacaataagcttttcgagctgtcttctcatgaaaacatccatgtgttaagcgagacgctggataagaccatcgcgcctgaaacgtttcaggcgctccagcacatccattcggtcaatcaaaaagagaaagggctttcggtttccaggtttgtcgcgtttctcgatgggggcaggctgcttgccaaacacgctgatccgcttatgcaccgccggctgagaaccgcgtttatgacgcttttggaaacctttgcggaccggcatgaaaacgggctgaatcatcccgatttccggcgtgtgctcttggatgtgtcaaagttttcgctgaaccacctgaatccatggcttgaacaagccgatatagagcgtgagatgccgaaggtggtgtggtatggagacgctaccaaaagccagctctattttctctattatctcatgctgatcggctgtgacgtcctattgtttcatccggctgcggaagatccgttcagcttgattgatccggatgaggaactcagctttgtgataaagctccccgcaacaggcggccttgagccattcccgaaagaaaagccggacagaacgtccacgacggcctaccggtcaacgaaagaaattgagcatgtgctgaaccatgaggaatctatgatgtataagccttggcagttcagggatcataccccgcagtccgtgacattaaaaacgacgtatgatgagttatttctcattgcgaaggagcgggcgtttatccggccgcaatttaaagcggacagggagcgggtggccgttccgaacctttttgcgaaagtgatgggggtttccaaagatacgaaagaatattggaatagactccataccgccgcagactatcaggagacacacatgatccgcagttttccgtttacggaagagctgaaagccaactaccagtatcactacagtcaggttttgaacgaagaaggagcgattgacgcggacaggctgaaaagaagcaacatctggcagtacaagcatctcccgtcaggcgtgcagaacgccatcgccaatgtgatttctgacatgtgcagaaacccagggctgaaggctttgcccggggagcaggcaagggatgccgcaatctatttgttccgccaggcgacgaacctgcccgcttcgctgctgcaattgattcagacgtttgattacgcccaaaccgttccgaaactcgttttatatcatacggaacaaaatggcgaactcacacgttctgacgccgccgctctgttgtttttaaataaattcggcgtcgatatcatcttgtataatccgccggggcatcaagacattgagcattatattgaagaaagccaatttgatgtccattggctggaggacatggtatttcggcaggaatataaggagccgtcactcgtaagaaagctgtttagaaccattacgcaaaagcagggagagtaaataaacatgacagaaaatcaaaatccgcttgttcttgataaaaatgaagagatttctgaacaaaaagcagatgacatcagggtgcagctgcgccaagaccctgaggtgcagcgcatttcacagcagattgacgtgaaaaaccaaatggagctgcttgagtacggaaaagaaccggcagttgaaatctcgaagttctccgaccgcatcttaaatatgatgaaaacaacaagtgtcacggattcaggcacaatgctgacgcagctcggaaaaatcatggaccgttttgacaaaaatgatttcgatgaaccaaaaggatttctcgctaaaatgttcaaacgcggcaacagcatgattgaaaagatttttcaaaagtaccgcaccctgggcggagaaattgaaaaaatccacgtcgaaatttcaaaatacaaagatgaaatggcaaagacgaaccatacgcttgaagagatgtatgaaaacaacattaactactacatggagcttgaaaagtatgtcgttgccgggcagatgaagcttgaggaaatgcaggcgctcattccttcttatgaagaaaaagcggccggcggaaaccagcttgcgcaaatgcagcttgatacgctgcgtgacgggcttcaggcgcttgaggaacgtgtctatgatttagatatggcgcggatggtggcgctgcaaacggcgccgcagatccgcctccttcagcgcggaaatacgaagctcatcgggaaaatcaattccgctttcgtcattacgattccgattttcaaaaacggcatcattcaggctgtcacagtcaaacggcaaaagcttgtggctgattcaatgagcgagctggaccgccgcacgaatgaaatgctgaagcgaaacgctgaaaatatctcaaaccaaagcgtggaaattgcccgtatggcaggccgtccgagcattgacattgagacgattgaaacgtcttggaatacgattgtcagcggtatgcaggaaacgaaacagatcgaggaagagaacagacgtatcagagaagacggagcgaaacggattcaacagcttcaggataatattaaaaacgcagtcttaaagaattaacacaccccgcttgcttacggcaagcgggatttttttgcgaaaaaagataatgacaatctgtaaagacaggtgtaaacttatacggtaatcattttcgatttgaggtgctgcttatgaacaaacaacctgccgtcactccgcgaaaacttctggcgattgccggaatgggctggctgtttgatgcgatggatgtcggaattttatcgtttattatcgccgcgcttcacactgattggaatttaacacccgatcaaatgaaatggatcggaagcgtcaattccatcggtatggcagcgggcgcctttgtattcggaatgctggccgacaggatcggccggaaaaaagtgtttatgatcacgctgttattcttttctgtcggaagcggcatatccgctttcgcaacgggattgacggtttttctcatattgcgttttctgatcggaatggggcttggaggggaactgcctgtcgcctcaacgctcgtgtcagaagcgtccgctcccgaaaagcggggacggatcatcgtgctgcttgagagcttttgggccgcgggctggcttcttgcggcggtgatttcctactttgtcataccgtcattcggctggcaggccgcgctgctcttaacggcgctggccgcattttatgcgctgtacttgcggagaagccttccggaatcaccggcgcatcaggcattgccgcagaaaaaaagcatacgcgggcaggcgggaagtgtctggacgaaaccgtatatccggccgacggtgctgctgtctgtcgtttggttctgcgtcgtcttttcatattacggcatgtttttatggctgccgagcgtgatgctgatgaaaggctacagcatgattgagagcttcgaatacgtccttctgatgacacttgcccagcttcccggatatttctctgcggcgtggctgatcgaaaaagcggggcggaagaccatcttagtcatctatttgctcgggacggcgggcagcgcttatttcttcggtgccgcggattcattggccatgctgctcacagcgggcatgctgctgtccttcttcaatctcggcgcatggggcgtgctttacgcctatacaccggagcagtatcctgcggcgatccgtgcgaccggttccggcacaacggcggccgtcggcagaatcggcggcattttcggtccgcttctcgtcggatcgcttgcagcccggaacgtttcgtttacagtgattttcgccgtcttttgtgcggccatcctgattgccgtcatcaccattattattctcggaaaagaaacgaaacagacagagcttgcgcaatgagcacccttttggggtgctttttttagtgagcggtctgttgacagacctatatttttccttaatattccttatttttaggaggggaaaacttcttttttcaggacaatgtcgcgaaaaaattcttgtttttgtaaaaaaaggataggaaatcagtttgcagcacattcggtggaaacgttctcaagcctgataaaagcccggtttcctttataatttatcctcaataaggaggattagagagtatttagaagcataccagaggaaaataagacacagggatgtttttaaagtaatgatacaaaataaaaagggattatgatgtttgtttgacttattacaaacgtgttacggtattaaagattgcttattatggagggaaaatatgaatttggatgagaaaccaattaagataaaagtcgaaaatgtatctaaggttttcggaaaacagacaaaaaaagccattcagatgctgtccagcggaaaaaacaaaaaagagatcctgaaagctaccggatcaaccgttggtgtcaatcaagcaaactttgatgtatatgatggggagatatttgtcatcatgggtctatcggggagcggtaaatcaactttagttcggctgttaaaccggcttattgaaccgactgccgggaatatttatattgatggtgacatgataacaaatatgtcaaaagaccagctccgggaagtgcgccggaaaaaaatcagcatggtctttcaaaaatttgcactgtttccgcacagaacgattcttgaaaatacggaatacggcctggagcttcaaggcgtcgacaaaaaagagcgtgagcaaaaagcgcttgattcgcttaaacttgtcggtcttgaaggctttgaacaccaattcccagatcagctcagcggaggaatgcagcagcgtgtcggacttgcccgcgcattgacgaatgatcctgacattcttctgatggatgaagctttcagtgcgcttgatccgctgatccgcaaagacatgcaggatgagcttttagaccttcatgactctgtcggcaagacgatcatcttcatcacgcatgatcttgatgaagcattgcgcatcggcgacagaatcgtgctgatgaaagacggtaacatcgttcagatcgggacgcctgaagaaattctgatgagcccgtccaatgaatacgttgagaaattcgttgaggacgttgatttatccaaagttctgacagcgggccacatcatgaagcgcgctgaaaccgtgcggattgacaaagggcctcgtgtagcgctgcagctcatgaagaatctcggtatttcatctatttacgccgttgataaacagaaacagcttctcggcgtcattcacgcggcggatgcgaaaaaagcggtggaatccgacttatcgcttcaggatattttaaatactgaatttacgactgtgcacgaaagcacgtacttgactgaaattttcgatgtcgtgtctgatgcgaatattccgatcgccgtcacggacgataaggaccgcatgaaaggcattgtcgtaaaaggcgcattaatcggcgcgctttcaggaaataacgattatataaatgttgaagattctgctgaacaagctcaggattcttctgttcagggggtgaagtaaatggacagattgcctagaattccgttagcagatatcgttgaccggtttgttgactggcttaccatgacgttcggaggtttctttgacggaatctcaaacggtttggccgctttcgtaaacgcgattgtgagcggtttgggtttcatcccgtctattttattgactgttatttttgcagctctcgcttggtggatcagtacgagaggaattgcactctttacgttaatcggattccttgttattgattatttgggctattggtcgccgatgctgcaaacgttggcgcttgtcgtcacatctgttttgatttccattattatcggggttccgatcggcatatgggcgtctcagaaagaaacggtccgccgcattgttacaccgattctggatttaatgcagaccatgccggctttcgtatatctgctgcctgcgattttcttctttaatatcggggttgtgccaggcgtcgtggcatctgttattttcgcaatgcctccgacgatccgcatgacggttctcggtattaaacaagttccggctgatttgattgaagcgacggaagcattcggttcaacgacgtctcagcgtctgttcaaggttcagcttccgcttgccacaaaaacaattcttgccggtattaaccaaagcatcatgcttgctttatcaatggtcgttatcgcggccatggtcggtgcgccgggtctcggttctgaagtatacagcgccgtgacacagttgaaaaccggtgtcggagtggaagcgggtatcgcgatcgtcatcgtagcgattacactcgaccgtatcacgcaaaacattaaagtgaagaagaagagcagggggaatgcctgatgcttaagaaaatcatcggtgtcggcgttaccgctgcgctggctctttctttggctgcctgcggttcgcagactgatggtaaggcaacggctgcggaccaggtgaataaaaccattatcggtattgatccgggatcggggatcatggccctgacggatgaggccgtgaaggattacggattgaaagactggaatgtcgtcacggcgtcaagtgctgccatgacggcgacattgaagaaatcatatgaccggaaaaagccgatcatcgtaacgggctggacgccgcactggatgttctccagatacaagctgaagttccttgatgatccgaaaaaaacgtacggaactgccgagcagattcatacaattacaagaaccggcttcagtaaggaacagcctaacgcggccaaagttctcagccagttcaaatggacgcaggacgatatgggagaagtcatgattgccgttgaggaaggcgaaaagccggccaaagccgcagctgaatatgtgaaaaaacacaaagaccaagtggctcaatggacaaaaggcgcccataaagttaaaggggataaaatcaacctggcttatgtggcgtgggacagtgaaatcgcaagtacgaatgtaatcggaaaagtatttcaagacctcggctatgacgtgaagctgacgcaagtggaggcgggaccgatgtggactgcgattgcgacaggcagcgcggatgcgtcattgtctgcttggcttccgaatacccataaggcatatgcgtctaaatataaaggcaaatatgaagatgtaggaacgagtctgacaggcgtcaagatgggtctggtcgttcctcagtatatgaaaaacgtcaattcaattgaagatttgaagaaataacgaagaaaagcagccctgtaacgggctgctttttttatgcttcaaacgatttgaggacggcagccgttaatatctcaatgcctgtaaagatggcgcttcggtcaaatgtcatttggggatggtgaagccccggctccagaccgcatcctaggccgagcatcgtcgtttttaagttcggcacctttaacccgtaaaagtgaaaatcctctcctccggttgtcacaagaggttcatccacatgttcttctccgagaatgccgcttatcgcagatgccatgatggcttccgcctctttgtttcgctcggctgccgggaggctgtgttctttttgcagttcgatttttgcgccgaatgcggcagccgccgcctcacaggctctttcggtttcggcggttaatttctccatggcggcattggtttgtgcgcggagatcaaggctgaacgatgcttttcccggaatgatattggaactctcaccgcctgcctgaagctttgtcatcttcacggaatgcgggatgccgggatcaagatgaatgaagctgagtttttggacgagaagagcggcgatttcgatactgttaaggccgagatgcggtctcgcgccgtgggcttcttctccgataatcaggccttctatatgctggcttgagccatgcagaatggacggtgcgcatcggccgtttgccgtttcctgtacggggcgcacgtgcacgccgtataagaaatcaacatcatccagtacgcctttttcaatcattttcagcgctccgccgcctttttcttcagccggctgaaaaataaagcggatggtgcccttcggaagtttcggctgactctttaaaagcatcatcgtgccgagcgccatcgtcatatgtgaatcatgtccgcatgaatggttcgcctgaaagacaccgtccacttcctgccacagcgcgtcaatatccgcccggacagccacaacaggcgagccttctccgatttcgccgacaacaccggtacaatcatcaaacgtgcgggttcggcagccggcctctttcagtttttcagtcagatattcagttgtttgatattctttccagcttacttcgggattagcgtgcaggtggtcaaaaatatccataatgacttgcttttcatgcgctgtgagtctgttcatgccgtaagtcctccttcaaaagctgtctgttttttatttttgatattgaaaacaggcaatcggtctgtatataatatagcacatatctgtattttctgaatagtttataaatttaaagcgggatggtgatgttatggctgtgccgaaggccgaacctgtattgaaaaagaagaaattgtttgtgatgcctgatgcttatgtgctgctgttcattgtcgctttactatgcgcgatagcgtcgtacatcgttcccgcgggggaatttgacagggtgacaaagggcagtgtgacgtccgccgtcccgggaagctatcattctttagaccagtctcctgtcagcccgatcgctttttttaccgcgattcaggaagggatgacaagttccgcgccgattatttttttaatcctgtttacgggcggcaccattgcgattttggagaaaacgggcgccatcaatggattgatcagtaatgtcatcagtacgttccgcacaaaacagctgctgtttattgcgattgtcggatctctattttcgatcctcggcacaaccggcatcgtcgttaattccgtgatcggttttattccgatcggcctgatcgtcgcccgctcgctgaaatgggacgccgtggccggagcggccgtcatttatatcggctgctatgccgggtttaacgcgacgattttatcaccttcaccgctcgggttatcacaaagcattgcggagctgccgctgttttccggtatcggcctgcggattgccgtctacatttgttttctgttatcatctattttatatatttatcggtatacgagaaaactcagaaaagcaaaggacgccagtctgctggggaacgattggtttcctgcggcaggttcactcccgcaggtttctgagccggaggacaagcatgtcccgtttaccgtccgccataaattgattctggctgttgcggctttgtcgcttgccggctttttatacggcgcgcttactcttggctggtctgattcagagatggccgccgtgttcatttttatctcaatcgtgtcaggcctgattgcgggaatggcggcaaatgatatcgcaaaaacgtttattacaggctgtcaggggctcgtttacggtgcgctgatcgtcggaatggcgagaagcatttccgttatcctggaacatggaaagctgcttgatacggtagtcaatggactagcgtcactgctgcacggtttcagcccgatggcaggcgcaatcggaatgtatatttccagcgccctgcttcattttctgatttcatcgggctcaggggaggcggtcgtatttattccgatcttggcgccgcttgccgatctgatgggcatcacgagacaggtcgcggttgaagcggtcatgctcggagaaggcgtcgtaaactgtgtcaatccgacttccggtgtgctgatggccgtactggctgccagcggcattccgtacgtaaagtggcttcgcttcatgattccgctggcgctgatttggtttgtcatcggtctcgtgtttatctgcataggcgtcctgatcaattggggtccttattaacatttttgtcaatgatatttcggtttatcattatgaatcggcaagatataatgggagttgtaagccattcttaatagtacgggaggaagtcatgaatcagcgtcggaacggactttcaaacgtgaatggaaagagtgagagtgtgaaagagaaagaacgaatgatttggtcagaagtcggaatgcttgtgggcacactgtctttgcttgacatcatcgtacgcggacttgttctgaactgtccgtttagggaatgggccggaagcttggcggttttcttcattataattgtttattattgcatcagggcgggggcgtcgggaatgctcatgccgagaatagacaccaaagaagaactgcaaaagcgggtgaagcagcagcggatagattcaattgcggtcacttttgcggtagcggcgattacgatgtacgacagggggtttccccatacattctttgcttggctgaaaatgatctttctttttatcgtctgcggaggcattctgtttctgcttcggtatgtcattgtgaagctgtcttacagaagagcgataaaagaaataaaaaagaaatcatcttgacaggtggtttctttttttgtttgaaagcgggaagtctttttaattgataggaatatagatttgaattcactctgtcacgttgctttgatagagagtgtgtgataagttgaaatgtaagcgttaacagaattctccagtcttcacaacagttgaaaggagctgaagaaagagtaagaggaatttttgactccgcagtcagtcttcaaaaatcaaataaggagtgtcaaaaatgtttgaaaaacgattcaaaacctctttactgccgttattcgccggatttttattgctgtttcatttggttttgtcaggcccggcggctgcaaacgctgaaactgcaaacaaatcgaataaggtgaccgcgtcatcggtcaaaaacgggaccatccttcatgcctggaattggtcgttcaatacgttaacacaaaatatgaaagatattcgtgatgcgggctatgcagccattcagacgtctccgattaaccaagtaaaggaagggaaccaaggagataaaagcatgaggaactggtactggctgtatcagccgacatcgtaccaaatcggaaaccgttacttaggcactgaacaagaatttaaggacatgtgtgcagccgcggaaaaatatggtgtaaaagtcattgttgatgcggttatcaatcatactaccagtgattatggcgcgatttctgacgagattaagcgtattccaaactggacccatggaaacacacaaattaaaaattggtcggatcgatgggacgtcactcaaaattcattgcttgggctgtatgattggaatacacagaatactgaggtgcaggcatatctgaaacgtttcttggaaagagcattgaatgacggagcagacgggttccgctatgatgccgccaagcatatagagcttccggatgatgggaattacggcagccaattttggccgaatatcgcaaatacatcagcggagttccaatacggagaaatcctgcaagacagcgcgtccagagatacagcttatgcgaattatatgaatgtgacggcttctaactacgggcattccatcagatccgctttaaagaaccgtaatctgagtgtgtcgaatatctcccattatgcatctgacgtgtctgcggacaagttagtcacatgggtggaatcacatgatacgtatgccaatgatgatgaagagtccacatggatgagtgatgacgatattcgtttaggctgggcagtgattggttcccgctcaggaagcacgcctcttttcttttccagacctgagggcggaggaaatggtgtaagatttcccggaaaaagtcaaataggagatcgcgggagcgccttatttaaagatcaggcgatcactgcggtcaatacatttcacaatgtaatggccgggcagcctgaggaactctcgaatccgaatgggaacaaccaaatctttatgaatcagcgcggctcaaaaggcgttgtgctggcaaatgcaggatcgtcttctgtcaccatcaatacttcagcgaaattacctgacggcaggtatgataatagggccggcgccggttcatttcaagtagcgaacggcaaactgacaggtacgatcaatgccagatcggcggctgttctttatcctgatgatattggaaatgcgcctcatgtctttcttgagaattaccaaacgggggcagtccattctttcaatgatcagctgacggtcaccctgcgtgcaaatgcgaaaacaacaaaagccgtttaccaaatcaataatgggcagcagacagcatttaaggatggagaccgactaacgatcgggaaaggagatccaatcggcacgacatacaacatcaaattaaccggaacgaacggcgagggtgcagcgaggacccaagaatacacgtttgttaaaaaagacccgtcccaaaccaacatcattggctatcaaaatccggaccattggggccaggtaaatgcttatatttacaaacatgatggaggcagggccatagaattaaccggatcgtggccggggaaagccatgactaagaatgcagatggaatgtacacgctgacgctgcctgagaatgcggatacggccaacgccaaagtgatttttaacaatggcagcgcccaagtgcccggacagaaccagcccggctttgattatgtgcagaatggtttgtataacaactccggtttaaacggttatcttccgcattaatggatagggctatcatcacatcagcgtgccggaaaacccccgcttctgggaaagggacagcgcgtcttcaatcacgctgaaaatgtgacagcatcctaaaacggttccgttttaggatgttgtcaacaatccggaaaccatcaccgatatttttttgtccaaaaatcaaacttttctcttgcaaaagtttgtgaagtgttccacaatataaatgtgaaatacttcacaatataaaaacagacaccacgaaacactggaggatgagcatacatgatgaacgaacgagtgaacaaagtagcattaatcggagcaggttttgttggaagcagttatgcatttgcgttaattaaccaagggatcacagatgagcttgtgatcattgatgtaaatagagaaaaagccatgggagatgtcatggatttaaatcacggaaaggcatttgcgcctcatccggtcaaaacgtcttacggcacatatgaggattgcaaggatgccgatatcgtgtgcatctgtgcaggggccaatcaaaaaccgggcgaaacgagacttgagctggtcgaaaaaaatctcgccatttttaaaagcattgtcggtgaagtaatggcaagcggatttgacggcatcttcctcgttgccacaaacccggtcgacattctcacttatgcgacatggacattcagcgggctgccgaaagaacgcgtcatcggcagcggcacgacactggattctgcgcgattccgttatatgctgagtgaatacttcggagccgctccgcaaaacgtacacgcccacattatcggcgagcacggcgataccgagctccctgtatggagtcacgccaatatcggcggagtgccggtgcagcaattgctggagaaacatgcagcttacaaacaggacgagctggatcagattgttgacgatgtgaaaaacgcggcctaccatattatcgagaaaaaaggtgcgacatattacggagtggcgatgagcctcgcccgcatcacaaaagcgattttgcgtaatgaaaacagcattttaaccgtcagcacatatctggacggccaatacggtgtaaacgacgtctttatcggcgttccggccgtcgtcaatcggaacggcatcgcaggtgtgacggaacttgagctgaatgaaacagaacaggctcaattcagccgcagtgcaaacgtgctgaaagatattctcgctccgcatttcgctgggtgaaacttaaactgaactatccaaatatatgtggtactaataaccccaagggggagacaaaataaaacacctttatgttgtaactagatatatatctaaaagacaacattgaggtgtttttttatggcgaaatgaaaatgctaatcaagtggtatcataacaggaaaaccagcacattcttcagaaaggctttttcaaacataaaagttttgttaaatgagtagtagcatcagttttttccataagtataacgcttgtttttagatgcactctatcaattccttcctccttagacaccagcgttcctcttaataatcaggacagcagcttatatcaatgtgagataaactaaaaaggcagactgttaataagtacctaaagaggaatgcccattgttaatgcccccatagattccttccacggatcattaaaatttagatcaattatccttaaagaaatctgatgaacactgtgaccgcatcgtagagtaacttgccacaattttttggctcaatttgcgttgaataatacgttgtttgcaattactagtgaggtaggagacatatatcgaaacgggctcggaaatctggtagccacaaacatagctgattagggtaatcgtaaaacttattttaaggatagttagagtcagtttgattcctgatcatattcgtatggacattttggtgcaggttagattaccggataatagatttattattattctgtaatataaaaaaagttaaaaaatgaaattgtgaaatagaatatatgcttaaacagagcggtatagatgcaactcttcttaaatatgaatttttttatgatagttaaatttagaatagtaattaatagttgttcttttttttatgaatcaaattaaatgcatattaaataaggtgaggacaatagattcaatataaataggataattttgatataaatcttgactgggataagttcaactgatattttagattataataacatgaaaataattgaaataaatcaaataaagtgtatacatacccattatttccttttttaatttcttggtgtctgtattgtgaagatgaaaaaggtaaacttatacttattcacattctaggaggtgatgtgataaattaatacgattatttattgaacatcacagatttatacataagcacaattaaaaagaagaggagaatatggaaaaaatgatgagccaaaatgtaaaggaaaaagaagattctttagacttaacatctattttagatgaaattgaatcaattgatattatggaagtttcagaatcgatgttgctttctgaaacaggtgcaacaagcggatcaagttcctcaagcagtacatcatgctgcggttcttgttcgtgtgctagctgcggtgcttgtacaagctgcggataagtaaattgtaggggagtgtccaaagtttgaaaaccaaattaaacgagcaaaactcattagacctaacatctattctaaatgagatagaatcaattgatattatggaagtttcagaatcgatgttgctttctgaaacaggtgcaacaagcggatcaagttcctcaagcagtacatcatgctgcggttcttgttcatgtgcgagttgcggtggttgtacaagttgcggataaattaaatgagacaaggacgagatcattctcgtcccagttctctttttcgtgatataaaatttaatgacggggatggagaataagatgaatgcttttccgtggtatatcattagaaagaatcctatatccgttgaagacttttcaggtttccgcgatataagatggataaaacaaatagagaaatttaaaatggaagaatcaagatatgaacaagaaaaacaagataccatcaaaagattggagcaaatgttcaagagagacaaaaaaaacgaaattattaatgtgaaacgaaaagtatacaataataaaatcatcaatcctgatcaatattctgagagtatcttaatggcaacaaaggattatctatttagaaaacaacaattgagagatgctgaaattaagctaactgcattttatgatgaaaagcatttgagcgatcgcaagttaatgcaacgattaatcagtaataatcatgaattgaccaacccactccctcttgtcaacttgaatttcttccataaagtaaataagtttttggagatagatgtaaaggaacacacagcaaatataaggaaggttgattatcagttaagcagaattatatcaagagcggctttgaaaacaagtccttttagttcttttacaagtatagaaataaaaaaattcaatgaaacacatacaaataaacacaaaacaaaggcttatcacacggagatcaatttttttctctttcagaaaatattacatatactttctatggataaagaatatgcaagaaactttcgttataaaatgtcgtccttctatgaaaaaaatgatcatttaatatttattccgcaaatagacttgaaccgaggtaaagtctttaataatgttgagaaagagttctcggtaaaaaataatataatgttcagagatataattcaatcttttcgtaccaacgaaactttgtcttacgaagaattaacgggtattttaaaacattatatggataataagacggttgaatcatttactaatgggctgctgaaaaaaggtttgctgtttgcggatgtacaaactgatgaatattccgaaaatgtgatagaagattttaaaagaaaattagaaaagttaccgaataactccggaaaaacggaaaaaatcataaatattgtacaagaagtgtatcaaaaaacgagggagtatgaaactcaattcatacagaaccgttttaaaataatgagagaactaaaagaaattatctcgaaactggaaagtgtactaagatatcctatagcaagtgaagtaatattttatgaagactatattatcaatggatctaatgattcttttaatatagtgcagaataatttagaagaaataaatatacttcaaaagctagcattaatgattaatattcctattcaagtccaatttgaatttgctgaggtttttaataaggagtattctgatagagaaattccagttaattccctggagctgaaagaaatatttatgagtgtaatcaaaaacttcagaaattggtcagatttacttgccccaatttcaaatttgaagtcaaaaaaagcacttgaaatggaagcgttgaaaaaagaaataaaaaaccattttttatttcagaaatcgagaaaaataaaagaaataaacatagatagacaactaatagaagactggtataaaacattcaaaacaatttttacggaaaaaagaacttattcttctacagctctcatacaaaaaagtggcagttattatgtcttaaataagctgtatgcaggaagtctgagactctttagccgtttttttgaatattttccggagatttatgatgatacggattttagagactacacaggacggatattcccaaaaaatacaatagaaatcagagaaggatacgggtttaatgcgaatcgccatagaaaacttattccaaatcgtttgatacttccgaatagccggggaagcgatgatgatatcaacaaaattccaattgataatttgtactttaaatataataaacagacagagcttgtagagattttttcaggtgttaacaataagaaagtagaaattgaatgtctagggagcttagtggattatatgctcccaaattcagtgcggatgcttttaaattcagttgtccctcgcttagatactgactttgttaatttatgggaacatgaaggttctggggattcttttgtcatagatcatataccatctataagattgggagatatcataatttccagggagaaatggcttgtaaacacagctttctttaaaagaagtttaagtgcagctaaagatgcaaaaaatctctctgaattttttattaagcatggtcttcctatggagtttttcgcgaaaaaatacctaggcgaggaaaattatcaacatgctaccgcaaaaaaaacagatatgaaaccgcaatattttaatttatactctcctatttttattaaggatttcaaaaagtttctagaaagtaacaggatgattataatagaagaaattaaaccgattcctcaaaatagaggttttaataaagaatatcagatagaagttttgctggaggatgaataattggctgattatatagaagtaaaagcatttttctttggaaatgaggccgaaaaagaacaagtatatcttaattttattttaccgtttttttccccgatccttggtcgttttcatgcagagcggggatggaccggaggaccgcactttcgaattatattgtcaaaaagtgatacaagtataattgaaacatttccaagtgaatttaagcgatactgcacaacacattttcctgaattaacacaggtcgagatagaaaacaatttgtccccttatttgactcatcaagatattataccgaatatggaaagaagagaaagcattccaattttgattgagaatcatttaagcgttctaatcggaccctacaatgaagaatatatgtataacacttttaattcttacgctcattttgtagcgcataccagagccctttttatgatgcaagagtttatttctgttaatatttataaattcaaagaaataagcccagaaacacagctcaaaactttgacaagaatgctttatgatgttttagcattttccagttatacggacaaattctctgtgctagtttatgtttcaaatacggaaggcgttttttcaatagctgatagtctaaataaaaaaaggtcatttgaagactcattcttaaaaatgtacaaagctttagaaatccctgcctattttacaaatcaatcatacaatctatctatcggttcaagctggtttgatactgtttcaaaaatcgtagattatacaaaaaaaaatttagatgctttagcagattcagaagatggattttattcgattgaaaaacagaaagaagatttagtaaagaatattgaaagtattgatagcccttttcataagaatctcttaaatcaaattgattcattacttaatcataatgagcataaaatgttcaagtttttaatcaatatcatttataagtcagttcatatgttggggtttacttttgttaagaaaaattttgcttgctttgctgtttccaaatatgtattagataagcatcatacaacatgggaagagattttaaaagaaagagagcgagtataatgatattaaaaacgcgttcgaatttttctatcatgcgtatagatcaatcgattctcataaagaaaataaatggacagcaccaagctgttttgtctgatgaagactataaaactttcattgacatattggcggaataccgtaatccaaagatgttatctttagtcaaccaaaacaatgactatttgaagctgtttaagtttgctctcaagagcggtttgctcatagaagtgaagggaaaaacaaatcaccttacaacgttaattacacagaatattgagaaccgttttgaagattatgaaacaattttggaagatttagatgagagatctatagaattaaaaggtgcaccagaacaggtcatttctttttttatgaataatgggattcttgatgatgaacgtgagcaaaaatccataatttattttaatgataatattagagaagctcccctaaaaagtatatgtatagaaataaatgaaagcgggcgcagttttctgtttaagaaaaaaagtaaggagcaatatgatttcttaaaaagatatgctaatcaatatccaaaagcagatggtgaacttgccagaagaattttaccttttttagtatacgtttatgtcacctctgatctatatgagagtgaacgccaggtgcaagatactttgttacttgaggatggaacaataatttcgattcctgaaaaggatattaccggagtaattgacaattatgagcgaaagttaccgaatgtgaatgatgatgaattaaccattattcaaaaacttgaatctgcttttgtaaactgcccgttgtttaagtgtgagtttaactcaactgagacatccagaataaatcaatttatggcagctcattatcaaattgatattaacaatgattttaaatatatgagtacacatattaattataaaaaagctgcattacatactttaatgcacagcatagaaaaattcttaacttacgaatctgagagaaataaagaaaatactttatggatagcagatcttgataaagatcgtttttatataagagggattgcctcatttataaagaaagaaagctccattcatcttattgaacgaattgatattacagcaaaaaaattgcttcaaacgatttatcatatgactgaaattaaagaagtattaattggaattgactatttgtttaaaaaggatgtcggcattgtttatctcattgatgaagatcattatatcctttataaaagcgaagtaacgacagattttaatgaatcaataatccggggattaacagagatcataagcaacaaggcaaatggtttgcttaaaaaaggtgaatcggttgaattatccagctttcaagtccgagatatcggtcggaaaagaccaaactcactaatattggctgagatgcttgaagttttttccgattatgatattaaagaaaaaccatggatataccaaccactatttgagtccagtaatttattaataggaagttttcaattaaccggggagaatttatcatgatgtactctataaataaagattaccaaaaagttaaaaaagaagatattcatggtaaagttaactattatgaaacttcttcttatgtttttatcggtccgtatgtaaatgatatagaagatccatgctttaactgctttaaagaagcggttaaagcaaatgggagcagatattattggtgcatagagcaggaacgaactgagttaactagctttaacctatttgcggatgatgataaatgtacggaagaattaaggggcgcagtactaatttttaataaaaatacaggaagcattgaaaagaaagaaatttacaaaaatgctttttgtgaaaattgcagttctgatttctttgagaacaaaatactgaaagataatcataatgaaaaattaaataaagagggtagagtcgtttcatttactaatgttattaataagctgaagaagcatgaaaaactcttaattgatcaggatacaggaataggaagaatgctgttcagagatgcagaatcagatgttatccctatgtatggtattgaagcgtatatcggacaaaggcaatatcattcatatggccgggcagagagtctaagtgcctctaagtattccgcaatacttgaaatgattgagcgccatgcgagtatgattccccaattcactaaaccgctgcgtgcttcttatcatcaactgaagcaaaagaaaatggatgtaattaatcctgaatcttttattttgcataaaagtgttgaaggagaacatttatattctcatgataaggaaatttattggacagcgtgccgacgtttagataacaataaagaagttttaattccagagcagttaatttattttgataaccaaatcatacgtggagaaaatcgatttatatatgagacatcaaatggggcagctcttgggaacagtatgaaagaagcagttatgtacggattgtttgaggtaattgaacgagattgttttttggttcattggtattgcaaaaaaacacctaaaagaatagacgtttcatcatcaaataatttacaaatcaaacttgttttaaaacaacttgacgatttgggctatgacgtgcacctttttgatattactctagaaactgatatccccgctgtatgggttcttgcagtaaaccgtaaggatggtgcgaatttaaagtattacaatgcagcaggagctcactacaatccagaaaaagctattttttctggtttagtagaggtagccacatctgctttaatttatgaaaaaaaacttgataaggagaaatcccatttaaattacttaatacaaaatccaagtggcgtaaaaaagatggaggaccatgttaattattattcctttgaagcaaatggcaaagcttttgattttcttctgaataatctggagcaaatggagctaatagaagtgcataaaatgactccagcatttccatttacgtatgatgcacttaaaagagcggtattagataagcaccctgatatttacatagctgatttaactcaatatttaactgaaaaattagattttcacgctgtgaaaattcttatcccaagtttgcaaccgatgacttttggacttcaaaatgagcgtctgaatttggaaagacttaatcaatattgcgaagatctatcgcttttaaaaaataaggaaagagagccgcatccattcccatgagtattactcttaatgaccttacttttaatagatatgaaaagaaccgtaaatctttgtcttttcaatttgtttcaccaagaggcacttcatttaaatatgaaaaggaccagaaaagaaactctcatcaaaataaacctttccgaaaactggccctatttgttgaagagttgtttcgatttcagagttatgaataccaaagtccttactcatttcataaatatgccccctcagctagaggaatctattgtttatacccttatgtcatctgtatgggatatgtatggctttatgatgctctggaccatagatgggtgtgtattggatatgtcccttctaaagttcaagctgtcgagcttatcatctcttgtgatttctggaggttatgctctgtttatggaagttttgggcttgcactaggattgttagaacttggacatatgacagcagatattaaaatggattccgaagatcatggttttcctgttaaaaaggttggctacatgtttaaccgttggcattattcaaaaatactgaaggctcctgaagatattcttcttggatgtctaatagagtttgagcagtcaaagccgattgatcagcctgacgtacgccacaatatttataagtataaaaagacttataactatcaaaaagaacttcttcaaattggcattatggactacataaatgctttgactaaaatggatgaaagtcttaaaaataatgattggttttacgaggagtcttcaaaaggtaataaagctcacagacattcaggtaaccatgtatttggcttactggatattagctctgcttattgtaacaagacttttttagcactcgttttatttttgcaaaatactaaaggaagaatgaataggtctaatcagttttcaatttatattgctgttcagaatatagaagattggaaaaaaggtatttattatataactgaaaacgggtgcaaattaatatcatctgattttgaaataaaaaaattcttttatgatacatacgatttctttgaaatagaaagatctcctttcacactatttgttacatatactggtgatggagaaacaaatcaagaaagtatatattatgcacatgtgggagcagctggccttattcagtatgttgctaggtatatggcagatgggaaggcttatacaaggcccattaaaaatataaatgatttatactgccacgagaaatttaaaaccgaacctaatgaacaggtcatttatgctatgcttttcggttacaacaatacaggtatgaggaaagttgaggggagagatttcgtatgaattggcattcttaccatctgtttattcatgatcaagcatgtcatgatctttttctgaaagagtatttaaaaaagtttttagacaaggaaaagggtttaataagtaaatttttttttataagatattggcaaggagggccgcattttaggtttcggtttcaaagccacaatcctgagaaggtactaagaaaattaaaaattgtatttgctgattttttaaaaaactacaacccttcctataggttaaaaaaggaacaatattatcataatcatacatttgacggagagctgcctgatgaagaggatatgtattgggtggaagatggtcagatagtttctattccttacaagcctgagtacgaaagatacggaggctttgatattatggaggtttctgagacaatttttcatcattcaagccaattagccttgcaggttattgaacaaataaatgatcctaatgtgttaacaaagattatcttggcttgtgatttttttatgttggctgaaagtcagttagcatatagccagcgcaagatattaaatgaaagatatcattcgttttggctgcactttgcaggtgaaagtgaaacacccattgaagagaacctttcaaaaataaaaaatgcatataaagcgagggtaaaaaaaacagccccattagatctcgatatataccatacctttaaaaaagttttagaggaacagattcgacatgctacagccataaaaccagatgtaaatataaatcatttgattttttcacatattcatatgtataacaatcgtattgggttgccaccttattatgaaaatcagattcctgttattatttcatagactggagtgatgtaaaaaatgaaatggaacttcaatcaatcaattacttatgaaaatacactttacagaaaatatcatctgcaatcaaaccatgccccccatattcagatgataaatgccccaagaagggaatatgctattcattccttagacagtgttggtgcaaaagtgaaatataagttaaaaagtatagagaatttgccttctttagaagtggaattatcagaagtgctaaaaaaaagaagatcttcctgggtattttctgaactggatttaacttttgaaatgttagagcagttattgacatatagctttggtattagtaatattagggaaaaaaagcggacatatccctctggtggtcaattttaccccatagaagtctattttgtgccgacagcaagaagtgtagatagcaatttgttagaggagaaagtgtataaatataacatagatcatcaagagattgtggaaatctgcgattttaatattgatgatttaaaagcttttagtgcatctactgatgtgggttttttttctattgatggatgtcaaattgttttatttttggtagctgaagacaaggatatatttgtgaaatatcttgagtttacatatagaattattcatttagatgctgggcatatggctcaaaattttttacttaccagtgctgctcttggactttcaagtattcctataggaggcttttatgaaaaaacagtaaaacaaatactcggtttagataatacgtcaaaaatgattatttatacactcttagggggataatctgtatgtctgagaagctcataaaacttaaagaaaactatcaaatcatacgaaatccgcaaaatccaagtcaagtatttgtttatgataaaaataatgaaatggtttttttgaaatttagcatgagttcattggaaaaattagagaatgtagattttaatcgctgggggcagcattttcaatcacttcaaatattaaaatcctctattgaaggtaatataatcatttcattatataacagatatccagatttgtttatcagtactaataatagcgaagatttaatgattgatgcaaaaatactggagagagaaaacattattaattataatcacttttatagtacatatcaattatccaaccaccaatatgattcatctcgaatttttttgtggggagcttcccaaacaaatctacttgtttttcatcagctcatgaatctctcaatagatgtcacacttattgtatcgttaaaggaaaaattaactccatatgaaaatattctttcaggcagaagtccatttcagcaagtgccggactttataaatagtgtgaaagaccattataacctggaaaacaaaaaagcaaagattttaatttttgaaaaaatatatgattttaaaacattagcaggaaaaaacgtgattcatattgttgacaacaagatactagataaatatgttttgccagagctatttaatagaatcgaatcctcaagaaataaaggtattctatattatggttcttatgaaaatgagttagtgatcggtcccttagtattctcaggtgaaactgtttcttattccgattttctttttaactacgataaagaaacaaaggcgccatcttcagttttaaatttcttatctgcaggaatgattcaacgggttatctcatatcttaatgctgattcactaaagtatctgtctgaagatgctcagcttcccttaaattctgtattttgcattgataagttttctcttaactctaggataatccaattaaagagagaggttttaaaatgaaagttattactcaaggtttgaacaaatcatataaagataaaaaagttctgcaggatattagcttcactattgaaaataacgagattgtggcagtattaggccctaatggggttgggaaaacaaccatgttagaaattttaatgacattgaaaaaatacgattcaggtgatgttcaaatattaggtcataacttaaataaagaatctaatattcaaaaagtgcgttcaaagatcggagttgtttttcaggagggggggatgtatgcatacctaaaaacaaaagaagtgttagacttattcgcctcgttttatgatatatctaatgatagaatcaatgaagttgttaacttattctcgcttacaaaacatatgaatacaaagtatgagaaactatcggggggttggaagaaaagagttttgttagctactgcatttttaaaccagcctgaattactttttctggacgagcctacaacgggacttgatcctaaagcgacaaaagatttatgggatgctattaagttggcgaaaaataacggaacaacaatcttattgtcttctcattctatggaagaagtggatatgtacgcagaccgctctcttattctaaaagatggcaaaattgcagaattcgattctccaacagtgttaagagaaaagtatcaatgtacgtattttaaagaagtgtattttgctattttagaaagggagtcttcacataatgagtaaatctttatttaaattatgtaaatatgattttgttgtttttttacgtgaaccttttttcgctttaccaattcttatactgcctgggattttcttttttgtctttatgtctattttcaaagaacagattggaggagcagaaaactttggtccgtatattccaatttacagcttattaatctcatttctcgtattattttttaatattggtcttcaatatgtaacagaaaaagaaagaggaattcataaacgtttaattatgtcttctattacaatatatcatgtaattcttacatatattattagaggagttcttatctcgttaattggttttattgagatattgcttgttggtaaacttgttttccatactattttgacagatcatatgtttttattcattctaactttcctgattgtaatcggtataaccttgttgtttagtttatctactcataatctctttaaaaattcaaggcaagttcttccttatacaatagtcatgtttcaatatgtattatttggatccggccttatgtttcctatcgagtctgttcctgaatttgttaagtatattgtttatataaacccattttatcacatgaaaaatttgttgttatctgtgtggaattggcaacagataatcaactggcaagggatagcatatttggtattggttattttcgtatgtatatgcttaatctatataaaatcgcgttctaaggaatactaaattaaagaattgtgtattggctgttttagcggcgtaaaatttacactataaaaaagcagaattgtttagaggtattatactccccttaggcaggcagatgttatcctaatctgcctgcctaaggggagtattttcgataactattatctataaattcaaagcccgacaaatttgcttagtggacattattctcaattagaaatgatatacgagtgtctaatatccagttcgtcaatgtcaggaaaatcgatgaaaaaggatagtcataaagcagccatgaacgaatggttgccctatgacaaagggtagttcaacaatttgcttactataagttaaatagcatttcttcccttataaagtttaagtatagaaatgttgattgcataagtatcaggcatttaatgaactcacctataagtgggtaaatactatactattccatctctacttgataggggataattaagtttcactaaacccgatcttcttcgttaattcgcttttttcgccatttcctgagaggtttttactctcgcttttcccataaacaaaatggtaacggccgcaatgacgatcggcgtcagcgcaagcgtaaatacatatgtgatgctttgcgacatggcgtcaataatgcgatccagaatgtgcggcggaatatgagcgcgcgtgccggcctggaaaatctcctgcggatttccgatgttctgcatcgcaccgcccgctcctttcatgccgctgaatgaatctgtgagcttgttagtaaacacattcgtctggatggttccgaaaatcgtcacaccgagcgtcataccgaatgatctcaaaaacgagtttgttgagttggcgcttccgcggtaacgcggctccagatcgttcatggacgcagccggcagcagtgagaagttgaagccgacgccgaatcctgagatcagcatgaataccgtcagcatcgtacgcgccgtatccggtgtcatattggaaagcagcagcattccgataaagaaagcgaccacggaaatcagcattaaagtgcggaatcgcacttttgtctggaaaattccgccgatcatacttccgataacagaaccgatcatcatcggcgtcaaaataaagcccgcgcttgtcgcggtgcttccgtacacagcctgaacgaagatcgggataaacaccgctaaaatgacgaacgtggctccgtaaaggaacgccagaatctgtgccgtagcaaataaacggtttttaaacatccaaaatgagataatcggttcttccgcttttctttccacaataaaaaaggcgataaagaacacggcgaacacagcgaacagaccgatgatctgcacggagttccaatcatacgtttttccgccgagctcaagagcgaacatcagaccgacaatggaaaccaccagcgtgattgcgccggcccagtcgattttctgcttcttgtgttcaagggattctttataataacgaagaatgaaaaacaatgataaaataccgatcggcacgttgatgtaaaacacccagtgccagctgatggagtcggtaatgagcgcgcctaaaagcggcccgagaacgctggacaggccgaaaacggcaccgaacatgcccgacatttttccgcgtttttccggcggaaataaatcaaaaatgatcgtgaaggcgatcggcatcagcgcgcctccgccgattccctgaatgacgcggtaaataatgagctgatccattgtttgggcgattccgcataacgcggatccgattaagaaaagaataagaccgaataaaaagaaacgtttgcgtccgtacatatcggacagttttccgtaaatcggcataccggccataacggctaccatgtatgatgccgtcacccacgcgaacttatcgaaacttccgaggtccgccacgatatttcccatcgcagtggcaacgattgtattatccatagccgacattaaaatgcccagcaaaagaccgatgacgacaaacttcgtcgaggcgtccttcgcggctgtttgttccatgctttttcctcccatacttacttttgatcattaaatttgctatgatcatattagatttgccgaaaattatcttgatcgtcaagataaattgattttatagggaggcctgtcagttgtcaacaagaaataccagaagcgagacggaggaaaccgcgatacagttattccgaaagatggccacaaggacgatcctttttcatcaggcggccgctcaatctctcggtctgtttccgaccgatttaaaatcagctgatatcttaaatgaagcaggcccgatgaccgcaggcgagcttgggaaaaaaaccggtctcagcacaggttcggtaacggcgctcattgaccggctcgaaaaagcgggatatgtcatgaggaaaaaagaccccgaagacaaacgtcgggtgattatcgtgccgctgacagccggaaaggcgaatgtgaagcaattgttcagctccttatcccagtccacgatcagcctttgccggcaatataaagaagaagaactgcggctgatattcgattttttaggaaaagcgacggacatgatggaagacgagcttgagaaattaaaataatatatcatagcacggcccattcatgaataacttgtacaagttgcatgaatgagggggaagccaatgaacatctttttaagctacatcgttctcgggctgtcattgtcagcacctgtcggaccggtcaatgcggcgcaaattgacaaaggcatcaaaaacggcttttggcatgcatggattttcggtcttggcgccatggccgcggacgggctgtatatgattctgatctatttcgggctgtctcaatttttgaccgctccttttgtaaaaacgtttttgtggctcttcggttttttcgtgctgacctatacgggagtcgaaacgttaaaaaatataagggaagccatgaatgtcagaagcggaaaaggaaaaccggctttttacaaaacattcggcgcgggattttttatttctctttccaatccgctgagcattttattctggctcggcatatacggcagcattctcgccaaaaccgctgaatccttcgatgcaaatcagcttttgatttacagctccggcattcttctcggcattttgatctgggatttttgcatggcggtcgctgcgagcactttcagaaatcttcttcatgaaacagcgcttcgctggctgacgggagcggcgggtgtgtctttgatcgttttcggattttatttcggctggcaggggattcaaatgctcatctcataaatagaaggactgtcacccatcgcctgtctccatcataacgtatcctgacgatactggaggtgggctgatggcaagcgagctgtacacaaaaagttgccttgaggaaaagttgttggatctgccaaattggcagagagtcgcttttgagcttctatcagaaaaagtaggtgataaagcggacgcgtttccgtgcattccgggacgtcagggatttttgacagatcagctccggatatcctttgcgggtgatccccgcgaagacggaaccccggaggaagtggggatgctgctgtccgagtacggaaagatctcaaggaataccggaaaatacgcgtcgctgcttgtgatttttgatacgcctgaggatttagctgagcattattccgttgaggcgtatgaagaactgttctggtcttttttaaaccggctgagcggctgcgacccgaatgactggccggaagacataccggaggaccctgaacattataaatgggagttctgctttgacggcgagccgtattttattctgtgcgcgacgcctgcgcatgaagcgagacaaagcagaagcttcccgttttttatgctggcgtttcagccgagatgggttttcgaaggattaaatgattcaaccgcgttcggacgaaacatgagccggctgatcagaaaacgcttagaggcgtatgatgaagcccctcttcatccccgattggggtggtacggaggaaaagacaatttagaatggaagcaatatttcctccgtgatgatgagacgcaagtgtcaaagtgtcccttttcttatttgaagagactgtttaaaccgacgaaataagctatgatccggcagggctgtgtccctgctttttttgtacgatccatgtcacgatcgcaatgacggcgagaaaacaaaggctgaccagaaaaccgggccggctcgatttctcaaacagcgtcccggagacggccgcgacaatcagcacaagggcgataacaatctgaacggttcccatctttgtcgtttcaagcagtttcttgcccgagaacaaaatgaacagccacgtataaagaagcatcaggcccgccgcggttgtcatgtgttcatatatatttttcggcagcaccaatgacaggatgatggagacgatgagtccggcaaacgtcaatcctagcgcaggccagcagatttttttgttttcctttaatctgaagcatttcggcgcatccccgtcatcggccatcgtacaaagcaatgtcgtcacggcaaacagcgaggcgacgagcgtggaaaatcccgcaataataaaaatcccgttaaaaatatcaagaatgagatctaaatgaaaacccttcagcgatgtaataaacgggctgtcctgttcggtgaatttgcccagcggcactaacagcagcgccaggccgagagaaatgacgtaaatcaccgcaagaacggcaagcatcagccggcctgattttgaggcttcctccggctttttcaaatgcacggtcatcagccccaagacttcaattcctccgaaggcgtaaaacgcataaatcagtcccgtccataaacccatcgctccgtgcgggaacaaatcctttgattcgttcggcacctgcacatccggtttatgagaaaatataccgcacaacgccaatatggcgatcacgataaacataaaaatcgccgccgtcttgacaacagcgagcacattttccgttttttgaaaaacggacagccccgtaaatataatcaaaagaccgagcaccgcatagatggaggcgaaaatccacagcggcacattcggaaaccaatgcttcgtaaacagcgagatcgctgtcagctggcttcccgtgatcagcatctcggacgaccagtacacccatccgttgctgaaaccggcccaagtgccgaaagcctttctcgcataagcgcaaaaagaccccttttcgggctgtttggccgaaagcttcgcgagctgctcaaagacaaaataggtgccaagcccggcaataagaaatgagatcagcgcggaatatccgcttttgacaatagcgatgctggacccgagaaaaaagcccgtcccgattgtgcagccgacgccgattaaggagagctgccaccaagcgagatttcctttaggctggtcctgtgatttacccatgaagttcaacccctttatcaaagcttagattgcggccgtcagaaggggaatatacatccaataaattgctttacatgaaacaaacggccgaagttcataatagaagaaaaaaaggagcagtctgatgacacagcaatttattgtaccgccgaaaaaagggctcggcctgaaggttcacaaagggcagattataaaagtagtcgatgtggaaggacagcaggtggctgacttcacggcgtatcatgccaaggacttctatgaacatcttgatcagggcgcgacgattgatgccaaccagtccattcatgtaaaaacgggtgatcatatttattcgaatttatacaagccgatgctgacgctgattgaggatacagtcggcaagcatgacctgctgcttcccgcctgccgtccggatatgaacaggcttttatacggaaagcataaagacgagctccaggatacgtgctatgacaatatgagcggggcgcttgaaccgttcggggtgccgcggccgcatatgcattacccatttgccatctttatgaacacggtgctcgatgagaaggggaacttatcagtcgaaacgcctctttctgacgcgggtgattatgtacggctccgtgcggaaatggatctcgtcgtcgcgttttcatcctgtccgattgaaaaaggaaaatgcaacggagacagcatcacggcgctgcgggtggaaatcagctgatcccggtgtatttgattcacttaaaatctgcacctgtgctatatttaacagagagtcgtacatagtggcatgattcattttcagcatgaacgggaaatggatcataaagaaacaatgcaggaggagtgattgggatgagcatccagaaacaaattatgaatgatctccatgtaaagccctcaattgatccgaaacaagaaattgaggacagagtgaactttctgaaacaatatttgaaaaaaacaggtgccaaaggctttgtgctcggcatcagcggggggcaggattccacgcttgcgggacgcctcgcccaattggcggctgaaagcatcagagaagaaggcggaaacgctgaatttatcgccgtccgtcttccgcacggaacacagcaggatgaggatgacgcccaattggcgctcaaattcattaaacctgataaatcatggacatttgatattaagtccgctgtcagcgcgttcgctgatcagtataaaaaagacacgggcgatcagctgtctgactttaacaaaggaaatgtaaaagccagaatgagaatgatcgctcaatatgccatcggcggacaagaggggctgcttgtcatcggaaccgaccatgcggccgaggcggtgaccggtttcttcacgaaatatggtgacggcggagctgatctgctgccgctgaccggattaacgaaacgccagggcagacgtttattagaagagctcggcgcgccggaacgcctgtatttgaaattaccgacggccgatctgcttgatgaaaaaccgcagcagactgatgagaccgaactcggcatcacatacaatgacattgatgattatttagaaggcaaggacgtttcttccgaagtgattgaggcgctggaaaaacgctacctcagtacagagcataagcgccaggtgccggcatcaatgtttgatgattggtggaaatagaatgaaaaaaacctcccttttaaaagggaggttttttgtttatctcatttttatttatctacactttcataaatccctacccaataccctttgctgctgtcgtagtatttgcttttgaaaatccattttgtcccatctaaaacgaaagaagcagcgaagttgccgttagggctttgaacgagtttgatggcattaatgccggcatctgctttcgttgagattgggctattttccacggatgctgttggtgatgcggcaaaggcaggagcggcagacatcagtaaggcaagagacagcgcagaaccggttaacacttttttgaatttcatttcgagcactcccttttcaaatgaaatgtattacagtgttaataattagattattatccataaaattccttctttatttctaaaatttttttcttaatttgaaaaaacatcccttcagaggggatgttttttatttcttaaagcagtgcctgatctcattcagggattctttcatatgcgcttcagcatgatgaccgaagtattcgagtgatacgaatccgccgtattgcctgttcaacagttctttcagaaagggttcctgctgtaaatcgccttgcagaacagacaccggcttgctgagataccagttgtcaaaattccagtgatagtttttcagatgaatgtggctgacggtatgatacagtttttccaaagcggacatttggtcaacgtgattgacgtgtaggttggagccgtcaaaaatggtgcggacccgcggatgtccgacatcctccaaaaatgccagcgccgcctccggtgtatccgcgtacgtatcgtaatgaatctcaagcccgatatcgacttcatagtcatctgcgagccgtgccgcctgctgaaattgatcaaccgcacgttgccacttttccggtgacgtccggtgcgaaggaagattgccggcaaagactctgatcaagggactgtgcagctgtcgtgccgcgcttgatgccctttgaacatcctttaacgcctgcctttcatcctgagtggcgaagtcagtgtacaaactgacggcaggcaccccgatgccttcctcctgaagctgctgataaagcctgtcgagcgggccgatttcctctatatattgtttagcgtgtccgtaccacagttcgattccctcaaaggagtgctccttcgcgaaagaaatgatgtcgaaaatatgctttttcttaaatcctgtcgtgcaaaaactcagtttcatcggtaatcctcccgtaactgtctatcatatgtgtactttttccccgggtgcgatacggataaacaggtgaaaagggcagacacttttttataagcggggtgtgtctgcatcaggtcagtgcggcacacaaattgtttaacgcttttttgcgtcaaagtattaaataattaaccgaagtgttgtacaattaatttcattcgagtaaggggggagaagccattgaaaaaagaaacggagctgagggccttcagtcccgtccgcaataaaccgactcgcgctcgttatgtgatattggttcttttgttttttatcactgcgattaattatatagaccgagccagtgtatctattgtcggcccatccattcaacattcgctgaacctaagccccgcgcttttgggcatcgttttttctgcgttcagctggacctatacggggatgcagattccaggcgggttcattttggataaattcgggtcaaaacggacatacggaatttctttatttgtgtggtcggtttttaccggagtacaagcttttgcgacaagtttcgggtttctattcggctgccgcctgctcatcggcatagctgaatcgccggcgtttccggcaaacaaccggattgtcacgacatggtttccaaggcgggaacgcgcctttgcgacgggtgtttatacggcgggggaatatgtcgggctggcgtttgccacaccggttttattctgggtgttaacggcatttgactggcgcgccgtatttatttcctcaggggtgctcggaattattttctccattttctggtttaaaatgtatcacgagccgaacgggtatcggaaagtgaatcgtgaggagcttgattatattaaagaaggcggcggactgactgaggtgtctgatgcagccggcaggatatcgtgggcggatttcgtccagcttctaaaataccgcaagcttgtcggattgtatatcggccaattcgccgtagcctccacgctgttcttctttttgacatggtttccgacttatctggcggaggcaaagcacatggctttcttaaaagtcggcttcgccgcatcaattccgtatatcgccgcctttttcggcgtattgttcggcgggtattggtctgacggcatgatgaaacggggggtgtcggtgaacgttgcccggaaaacgcccgtcatcctcggtcttctgctgacaggctccatcgtgctcgcgaatgttacggattctgctcccgcggttttgacgatcttatccattgcttcttttgcgcagggcatgtccaacatatcctggacgatgctgagtgaggtcgcgccaagcgaaacaatcggattggcagggggcgtctttagctttttcgccaatatggccggtattatcaccccgcttatcatcgggtttatcgtttctgcgaccggttcttataacggagcgattctgtttgtcggcgctgtcgcatttatcggggcattttcttatattttcattgtcggaaaggtggaacgcattaagctccgatagaaagaaaaactcatctcttcttataaaggatgggttttctttcattgcattatctctatatttcaatattgagttatcatataataaacataactttttcatttcttaggaggatttcgccgaagatgaacgcaaaacgtgccattcccgtaagagaaagaaatatcgtactgatcggattcatgggtgtcggaaagacaacaatcggccagctggtcgctaagaaactatacagagacttcattgatattgatctgcagattgagaaagatttcaatatgtccatccctgaaatgtttgagaaaaaaggtgaagcctttttccgtcagactgaaaaggactatatattagatatctgccgcaatacgaaattcaagatcgtgtcgcttgggggcggttcgtttaaacaagaggaaatcagacagtgctgccttgaaaactgcctcgtgctccatcttgatttatcatgggagaattggaagcagcgggctgacctgctgattgaaagccgtcccgttctgcataaccgttccatggatgaaatgcagcagctctttaacgagcgccaaagcatctatgataaacataattcaaaagtggcgacggataatctggaaccagaagaaatagccgattatatcgtagaaacgttaaaaatcggctgggacctgtatcagccgatgtaaaaagagccgtgacgctgtgagcgcacggcttttttgtttttaaacaaacgtttattaaaatgtttagaaaatgagtgtaaaatcgtgttaagatagagtcagaaaattaaatcttataaaacaaaggagaataatcggatatgcaattatacgacttgccgctcgaccaactgcaaacctataaaccaaataaaaccgctcctcatgacttttcggatttttgggcatcatcattacatgagcttgcaaaggaagaggcaaagcctgaattgaaggctgaaagctacccggctgacggcgtgaaagtattccggctgacataccgaagcttcggcaaggcggaaattgagggatggtacgccgttcccgaccggcaaggaccgcatccggccatcgtgaaatatcacggctataatgcgagctatgacggggatatacatgacatcgtaaattgggcgcttcacggatatgccgcgttcggcatgcttgtccgcggccagcacagcagcacagatacaagcgtctcaccgcacggacacgttcccggctggatgacgaaagggattttagataaagatacatattattaccgcggcgtgtacttagacgccgtccgggctttggaagtcatcagcggctttgatgaagtggatgaaacgaggatcgccgtcatcggcgggagccagggaggcggactttcaatcgccgcggcggcactatctgacattccgagagcggttgcggccgattatccttatttaagcaattttgagcgggccattgatgtcgctcttgatgagccgtatcttgagattaactcctttttcagaaagaacggcagccccgaaacggagaaggccgcgatgaatacactggcctattttgatatcatgaatctggcggaccgcgtaaaagttccggtgctcatgtccatcgggctgattgaccgcgtgaccccgccgtcgacggtatttgccgcgtacaatcatctggtgacggaaaaagaattgaaggtttaccggtatttcggacatgaatacataccttctttccatacggaaaagctggcctttctgaaagcgcatctgaaaggctgacgacagcgaaaagcccaagtacttgggcttttttcaggaatgatcacggaaaaggacggatacagatgaaacaaaggatcatcgaagaattaaaacgaattgaagcacagcacggcgtcaaggtgctttacgccgtagaatcagggagccgcgcatgggggtttccgtcaagcgacagcgactacgatgtgcggtttctctatgtgccgaaaaaagaatggtacttttcgatcgaaccgcatagggatgtcatagaagagccgatccatgacatgcttgacatcagcggctgggaactgagaaaagcgctgcggctttttaaaaaatcaaatccgcctcttttggaatggctctcttctgagatgatctattatgaagctttctcagcggctgaaaagcttcgaaaactgaaaatccgcgccttttcgcctgaagccggcatctatcattatctcaatatggcaaaacggaatgaaaaaacggaattgcggggcagtgaagtgaagattaaaaagtatttttatgttctgcgtcctctccttgcctgcagttggattgaaacgttcggctccgtaccgccgatgtcatttcccgtactggccgatgccttattgacggatgaagcgctcatttctgaaatcaatacactgcttacaaggaaaaaaagcggtcaggagctggctccggaaccgagaaatacgatcattcatgcatttatagaagaagaaatagaacgcatcgggcactatgtcaaaacgatcaaaatgccgaaacctgacataacggaggaactgaatcggctattgattcagaccgtcgaagaggcgtggggggaaaaaggcggaaattgacgattgccgtcatttccgtccgccttttttcggcataatccgcctgctatctaagaagctgattgtggtaaaaccacaaaaatttatcagaatctttgtatttttagaatattgtgagaggatgttttgtccatttacaatagactcatacaaatacttcttagattgcggggtgttaaggttggaagtgattacaagagattttttcttatttttatccaagagcagctttctcaataagatggcgcgaagctggggaagccgtgtggcagccggcaaaatcatcggaggaatggatttccgcagttctatcccgacaatccgacatttgaacagccaggggctgtcagttactgtcgatcatttgggggaatttgtcaacagcggtgatgtcgcgaaagaacgcaccgaggagtgcatgcagaccatcgccttaatcgctgatgaacagctgaattcccaagtgtcattaaaaatgacgtctttaggtcttgatatagatctcgatctcgtctatgaaaatatgacgaaaatcctccagacggctgaaaaacataaagtcatggtgacgattgacatggaagatgaaacgagatgccagaagacgctggatatctttaaagacttccgaagccggtatgaatatgtaagcaccgtggtgcaggcctatctgtacagaacggagaaggatcttgatgacctcagcccgctgaatccgtttctgcggcttgtcaaaggggcctataaagaatcggaaaaggtggcctatcctgaaaaaagcgacgtcgatgaaaattataaaagactcatccgcaaacagcttttaaaaggacattatacggcagttgccacgcatgatgacaaaatgatcgagtttacaaaacagcttgccaaagagcacggcattccaaacgaccgttttgagtttcagatgctgtacggcatgcgctcgcaaacccagctcagcctggtggaagaaggataccgcatgagagtctacctgccttacggggatgactggtacggctatttcatgagacggctcgctgaacgcccctcaaacatcgcattcgcctttaaaggaatgactaagaagtaaaaaagggagagatgacaatgactacaccttataaacacgaaccattcacgaatttccaagatcaatcgaacgttgaagaatttaagaaagcgcttgcgacggtaaatgagtatctgggaaaagattatccgctcgtcatcaacggtgaaaaggtagagacggaagcgaaaatcgtttcaatcaatccggctgataaagaagaagtcgtcggaaaagtgtcaaaggcgtcccaggagcacgctgagcaagcgattgaagctgctgcgaaagcgttcgaagagtggagatacacatcccctgaagaaagagcggccgttttgttccgcgcagctgccaaagtccgccgcagaaagcacgaattctccgccctgctcgtcaaggaagcgggaaaaccttggaacgaagctgatgcagatacggctgaagcgattgacttcatggagtattatgcacgccaaatgatcgaactggcaaaaggcaaaccggtcaacagccgtgagggcgagaaaaaccaatatgtgtacacgccgactggagtgacagttgttattccgccgtggaacttcttgtttgcgatcatggcaggaacaacagtggcgccgatcgttactggaaacacagtggttctaaaacctgcgagtgctacacctgttattgcagcaaaatttgttgaggtgcttgaagagtccggattgccaaaaggcgtagtcaactttgtgccgggaagcggagcagaagtaggcgattatcttgttgaccatccgaaaacaagccttatcacatttacaggatcacgtgaagtcggtacgagaattttcgaacgcgcggcgaaagtgcagccgggccaacagcatctgaaacgcgtcattgcagaaatgggcggtaaagatacggttgtcgttgacgaagatgcggacattgaattggcggctcaatccatctttacatcagcattcggcttcgcgggacaaaaatgttctgcaggttcacgtgcagttgtccatgaaaaagtgtatgatcaagtattagagcgtgtcattgaaattacggaatcaaaagtaactgctaaacctgacagtgcagatgtttatatggggcctgtcatcgaccaaggttcttacgacaagatcatgagctacattgaaatcggaaaagaagaaggccgtttagtaagcggcggcaccggagatgattcaaaaggctactttatcaagccgacgatcttcgctgaccttgatccgaaagcaagactcatgcaggaagaaattttcgggcctgtcgtggcgttttctaaagtatcaaactttgatgaagcgctggaagtggccaacaatactgaatacggtttgacaggcgcggtcattacaaataaccgcaaacatattgaacgggcgaaacaggaattccatgtcggcaacctgtacttcaaccgcaattgtacgggagcgattgtcggctaccatccgttcggaggcttcaaaatgtccggcactgattcaaaagcgggcggcccggattatttggccctccacatgcaggcgaaaacaatcagtgaaatgttttaagagggactgaatgggcatcctcctcgcggggggtgtccatttcaccataaacatataaagcggaggaggaaatgccatagcaaacattcagttgattatttccatttgtatttatatggcgggtatgctgtttatcggttatttcgcctacagacggacgtcaaatctgacggattacatgctcggggggcgttctttaggccctgccgtcacagcgctcagcgcgggagcggcggatatgagcggatggctcttgatggggcttccgggtgctatgttctcgacaggattaagcggcgcttggattgtgctcgggcttgtgctcggggcgtgggcgaactggcttttcgtggcgccgagactgagaacgtataccgaaaaagcggggaattccatcaccattccgggtttccttgaaaaccgtttcggtgatcatacgaagcttctcagactgttttcgggtcttgtcattctcgtctttttcacattttacgtatcatccggcatggtatccggaggtgtcttattcaacagcattttagggttgaattaccacacgggactgtgggtcgtgacaggcgtcgttgtcgcctacaccttgttcgggggctttttggcggtaagctggacggactttgttcaagggatcattatgtttgtggcgcttattcttgtgccgattgtgacgattttccatacgggcggcccgggggaaaccgttgccgatatccgttccgtcaacccggaactgtttaacatgttcaaagggacgaccgtccttggcattatttctttatttgcgtgggggctcggctatttcgggcagccgcatattattgtgcgctttatggcgatcacgtctgtgaaagaaatcaaacgtgccagacggatcggaatgggatggatgattttgtctgcactaggcgcgctgtttacgggtcttgcgggaatcgcgtattaccaccagaacggactgaagctggctgatccggaaaccatttttattcagctcggcaacattctgttccacccgattattacgggatttctcatttctgcgattttagcggccattatgagtacgatttcgtctcagctgctcgttacgtccagttctttagtggaggacttgtataagtccatgttcaggcgttcagcttctgataaggaactcgtatttctggggagaatggcagtgcttgcggtgtcaatcatcgctttggtgctcgcctgggagaaaaacaacacgatacttggtcttgtcagctatgcatgggcgggattcggcgcttcattcgggccggtcgtactgctcagtttattttggaaacggatgacgaaatggggggcactcgccggcatgattgcgggagcgattaccgtaatcatttgggcgaatgccggtctttcagactttttgtacgaaatcattccgggctttgctgtaagccttgccgctgtatttgtcgtcagcttattgacacaggctccgtcaaaagatgtcacagatcagtttcatgagtaccgtgatacactttctcaataaaagcaaggaacgagaggaagaagggaccgccctttttcctcttttcacgatacagaattccggattatgccgttttgggaatatgtgaatttttttctatacaaaaagtcaccccgcagagtatgataaagataaaaagagcataggagaaataggtatggaagagcttttagagagagttttttcatttacggacattgataaattaattgatttcatcagttatgaattgcagaagcccgttattctggaaagcgcggatttctttttgcttgcctataattcttattacattaatcacttcgactccgccaaccagcagacgatattttcaaaaaaatgccccgtgcagatttttgaaaggtttctgaaggacggggtgatcgaaaagctgaaaaccgttcctgaaccgttccgtgtcgaaaaaatagacagtatcggactgaatcagagagtggttgtaagcgcaaaacataaaggcgaagtgatgggctacatctggattcaggagctcgaccgaaacttgacggacgaggagctcgattttttatatgaaacttcattccatgtcggaaaaatcatctataaaacgaaccggctgaaacaggaaaaagaagagagagcggaagacctggtgaaacgggcgatctttcagcaattctcctctgaaaaggagttcaggcgggaagcggaaaagatgaacgccgtgctgccgtcggttttttcggtagtcgtcctgcacgccgcaaatggggatggggaggcagtcgaagatgtgaaggaaaacatcaaatcgtacttgaatttgcgggataaagtcagtcacgtcttaaccattgattccaatattgtcatcgtcgtcgcaagcttctcgcaaaaaagctccggcacttcggcagcatctgaatttatccacaaactgctgactcattttcactttcagaagatccccactcccatctatatcggaatcggcaatgaatacagcagcatcctgaagcttggcaaaagttatatagaggcccttgaagtcataaaggccgccgaaattaccggaaaccaggaaaatatcccgtacgaatacagtaagctcgggatttaccgctatcttgaaagcatcgaagaaaaaaacgcctcactggaatatgtaaacgaagatttagcgttattaaaagccaaagacagagaaagcagtaccgaactgctgaaaacgttagaaatctatctcctcaataactgcaaaacaaaaccagccgcagaacagctttttattcatcaaaacacattgaactaccgtatcaaacagattcttgacatgacatcaattaatttaaacgacttcaggacaaggtgccagctgtatctcgatatcatgctgatgaaaaagagataaaaaagaaaccagtcgccgtactggtttcagttttaataccttcccgcttatcaatctcagaacctcacttctgaatcactccttttccgcaagagagaaatgaataaacacttctcctcaatatgtgttatactttcattgatattgattctcaattaaaaatgtttgaagtatagatataaacgggaggcagaacgatggcggaaaatcatgaggtgtatgacgtcacgattataggcggaggcccgatcggcctgtttgcggctttttattgcgggatgcgcgagctgaaaacgaaagtgatcgagtttttgccgcggctcggagggaaagtgtctatgtttttccctgaaaaaatcatccgtgatatcggcggaatacccgggattgccggagaacagctgattaagcagctgaaggaacaggctgcgacatttgagccggatatcgtgttgaatcagcgggtgaccggatttgaacggctggaagacggaaccattgtgctggaaagttccaaaggggaaaagcactatacgcgcacggtgattttggccgtcggcatggggacgcttgaggtcaatgaacttgacagcgcggatgcgagccgttattcgggaaagaaccttcattataaggtggagaagcttgatgcgtttcgagataagcatgtcgtgatttccggagggggagataccgcggttgactgggcgaatgagctggaaccgattgcggcgtctgttaccgtcttgcaccgcagggaggagttcggcggtttggaaagcagcgtggcgaaaatgaagcggtcttccgtgcgggtgcttgcgccatatcgtctgaagcatctcaacggcaccggagaacggatcgagagcgtcaccatttgccaaactgagtccggactttctgaagtcatcaagcttgatgagctcattatcaaccacgggtttaaaattgatctcggtccgatgaaggactgggggcttgagatagaagaaggcaggattaaagctgacagacatatgcggacgaatcttccgggcgtgtttgtcgccggtgacgccgcccattatgaaagcaagctcagattgattgcaggcggtttcacggaggggccgaccgccgttaacagcgccaaagcctatttggacccgcaggcggatcagatggcgatgtattcgactcaccataaaaaattggtgacacaataaaaaagggctgacccccgatgttgagtctggggggtcagaaaagcattccggcgtatcagctgtgaacgagcatgtctttcatttcatttcgtataaacgcaaataactgttcctgatttttcacggcggtaaacccgcagccggcggggacgtcttcgcccatgcagatgacgggagggcggtttgctgacggatccggtgatatgccgatttgttttccggcgctgatcaaatgctgagcggattctttgcccgtacagataatcatttgcagaggagactcgctgatcgtgcgttcgatcatggaaatgaaccgctcatctgcgatatgttcatgggtgatataaaacgggcatgattttgagtctgacaagttttctgctgcttgacggcttcctacaatgagtgaatgcggagaatcaatttgacattcggataggacaaagccccgttttgtcagttccgtctttgcggcctcagtcgctgcattcaggcttgcggtcacccggcggatgtcgatctgcttgaaagccagtgtgtcaaagaattcgcataccgcaaggcgtgatgtgaaaaatagttgttcaaaggtgctgatctgtttcaggatattttcgtttgcgggcatttttttaacgatccgcttcggccattcaataacatcggcgccatattcgcgcagcttgtctgtcaatgtatgttcttcatcgccatgagtgacaaccatgatatgctgcccgatgaacggcttgctttcaaaccagctgtgtgtttgaaaattgacaatatcaccaatgacgataatggctgggttggtgatgttttggctttgaactttttcatggatatcctgaagcgttcctttaacgctccgctgccgcccccacgtcccccattgaatgacgagtacgggaacggaaggggattttccgtactccgtaagcttacggcatataaatgacagatttttaacgcccatgtaaaacacaagcgtttgaacgcttcgggcaagcccttcccagtcgagattcggcctgccgtgcaatgatgtatcatgagcggtgatcatcgcgaaggacgaagcgaaatcacgatgagtgacggggactcccgcatacagcggcgctgcgattcccgaggtgatgccgggcaccatttcgtagcggatgccgtgctgatgaagcgcctctgcttcttcgccgactctgccgaacacacttgggtctccgcctttcaagcggactacggtgcagccctccgccgctttttcaatcagcagggcatttatctcagactgtttcataaaatggcggtcgggcagctttccgcaataaatgaaccggcagtccggtgaggcatattcaagaaactttgggtttgcgagccggtcatacaaaataatatccgctttctccagagcctgttttccttttacggtgatcagccccgggtctcctggtccggcaccgacaaaatatacgattccgtttttcatgatggcgtcatcccttcagcagtttaaaaaatgaaggaccacttgaaaaagtgatccggtctttgctcaatacaggaggtatacattctctccttcaatcagtgtttcgtatgttttgacacagccatgatccggctcttggacttttccgtcttctaaggagattttccagtcatgcatcgggcagaagacgtattctccgctgacgatgccttcagccaggacgccccctttatggggacagcgattttcgacggcgcggacgctcccgtcagaaagcttaaatacggcaagctctttatcttctatatatacggtttttcctaactcctcgggtaattcgtttactttgcctatgcaaacctttgtcatatctttattcaccatgtccgttcccccttactgttttatgaagtcgtgacgacattttcgaatagatctttagatgcttttttatctttaaggaagtattgccacggatctttgtggacagagagtgtctcattcattctgtcgttgagctcctgccgtttttccggatcgtttaatacggattggacatgagataaaccgacgcgctcaagccatgcggatgtccgctccagatagtttgccgtttctctgtagtactgaaggtaagcccccgcatattctaagacttcttcattcgtttttactttcatcagcaaatcaccggcgcgcaaatgggttccgccgtttccgccgacataaagctcccagcctccgtcgatgccgacaacgccaaggtccttaatgcctgattccgcacagttccgcgggcaggcggacacggccattttgaccttatgaggcgtattgagcccttcgaattttttctcaagcgcaatgcccagtgccatggagtcttgcgtgccgaagcggcagaattgttcgcctacgcacgtttttaccgtgcggagtgtttttccgtacgcgtagcctgacggcatatcaagctcggcccatactttcggcaggtcttcttttttgacgccgatgagatcaattcgctggccgcctgtcattttaacgagcgggatctcatatttgtcgacgacatcggcgatcttgcggagatcctgagagttggtcacgccgccgtacatccggggcacgactgagtatgttccatctttttgaatattggcgtgcatccgttcgttcacaaaacgggatgttctgtcatcctcgtatgtagccggattaatcatgcctaagtagtagttgagggcaggacggcatttggagcagccctccggcgttttccagccgagcacgttcatgatttctcttgtatgggacagccctttggctttgatttcttctacgacttcatctctcgacagtgatgtgcagccgcaaatcgcttctttttgcgcggacgcgtcaaattctgagcccagtgtatattgaagaatgtcttccacgagcggtttacagcctccgcaggaacgggatgccccggtgcatgctttgatttcgtccgtagatgtgcagcctttttcctgaatggcttgaataatcgcgccttttgaaacgccgttgcatccgcagatgatttcatcgtcgctcatcgccgcggtcatgcttgcgtctgcttcctgatcaagaggctgtaagattgatattttggaagtttcggagatatcggcttctttttgaatcatagaaaacaggcggccgccctcgctgctgtcgccgaacaaaacagcgccgacaatttgattgcccctcaggacgatttttttataaatgccgtcctgctcatcgaacactttaatcgcttttttgtcctctgattcgttaaagtcaccggcagagaagacttcgacgcctgatacctttaattgagtggagagaacggagccttcatacggttttgtttcaatgccgcaaatatgtttggccagcacttttgcctgttcatagagcggcgccacaagaccgtatgcgattccgcggtgctcggcacattcaccgaccgcgtaaatgtgcggaatgtcagtctgcatataatcgttgacaatgattccgcggtttaccggaatgcggctttctgtgccaagctgtgtattcgggcggatgccgaccgccatgacgaccaggtcagcttcgatgcttgtgccgtctttgaagcgtaccccttcgacacggtcagtaccgagaatttcttcggtttgcttttcaaggaaaaaggtcatgccttgtttttctaattcgttttgcagcaggcgtcccgccgctgcgtcaagctggcgctccatcaggaatggggcgaggtggatgacagacacgtccattccgagattcagcagtccgcgtgcggcttccaaacccagcagtcctccgccaatgacggctgcttttttatattgttttgacgcggcgagcatcgtgtctgtatcttttatatcccggaatgccgtgacgccttgtttgtctgcgcccggaatcggaaggataaaagggacagagcctgtcgccaggatgagttcatcgtaaggctggattctgtctgcatcggtgatgacggttttgttttccgtgtcgactttgatgactgtttcaccggtatacagctgaatgttgttttctttgtaccagttccaatcgtttaacgtaatgtcttgaatgtcggtatcgccttgcagcacttttgacagaaggattcggttatagttgggatgaggttcggccccgaatattgtaatctcgaattcgtcttttgaaacacgcagtatttcttcaatcgctcttaccccggccattccatttccaacaaggactagctgtttttttcccatcagatgatccgctccttatctatgttttctttagcgtagcacagcaaaaacaaatatttaaggtgcatgttatgaaatgtaacaaaaaatactaaaaaatctaaaaattttatgaaaaattatatagggctgattcgtaccgcacacatcttaaaaccgggcattttacagtccggatccaaggcttcaccaattaagtcgttgacgttttgcgtgtcagaccaatggatgggaacaaacaacgtgtcttttcgtactttctccgaccatctgctccggaccgtgatgctgccccggggggattctattttcacgagaacacggtcttcgatatgatagtcggccgccgtttttggatggatttccacaaaggattcgaaatgtcttgcagccagggcagagctttttctcgtttggacacccgttaagtaatgagacatcacccttcctgtgattaaataaagcggatagccggcgctcggtttctctttcgggacggccggttcatttggaatcacgcttaattcagctctgtgatcgggatgggcaaatgagtgctcaaacaatcgcccggttccgggatgatccgcttcaggacatggccactgaatgccgccttcccgcctgagcctgtcataggtgatgccagagtaatcagcaattccgccgcggctcgcttctctcagttcgttaaagatttcctccgacgacgtatagggaaaataatgccctttaccaagagccgaggcaatgtcacagatgatctgccaatcatgtttcgcttctccggggcaggtgcggctcgcttctcttaatgtcacgcggccttctacatttgtcatcgtgccttcgtcttccaaataagaggaggcgggtaaaatcacatccgcgaatgccgcggtctcagaaataaataagtcaactgcgacaaagaatctcagtttcttgattgcctgcttgacgaaattcgcatttgggccggaaacagccggattggaacacatgagaaacagtcctttgatgtcgccgctatctattttttctatcatttcataggctgagaccccttttcgcggcagctcttcctgatgaatcccccacaccttcgcaatatacgcccggtgttcttcaatttcgatagaacggtagcccggaagctgatccgctttttggccgtgttctctcgcgccttgtccgttgccttgaccggtaatcgccccgtaacctgagaagggcttgccgatttttcccgtgatcagcaccatatttaagaaagctttcactgccgcggtaccgtcagtctgctgttcgatcccccgcgctgtaaacagcatgccggatgtttccttggcaaacttcacggcggcctttcgtatatgctccaaaggaacacttgtctgctcggagatctcgttcagatccaaagcgtcggtatgctgtttgagcttattgaatccgtttgtgcgtgtgcggataaagtctttgtctgtaagctgttcgtcaatgcagattttgacgagtccgtttgccagggctgcgtctgtgccgggcttgtttttcaggtgaagatcggctattttggtcgtcgccgtttcccggggatcaatggcgataatgtaagccccgttttctttcgctttatcaaaatacggcatgatcgtcggctggcattcggcgatattggtgcctgccaggatgatgacacgtgtatgcgggatgtccgataatggattcgtcaggcccctgtccgcgccgaatgtctggccggccgccgttgctgcggcagacatacagagccgcccgttgtaatcgatgtatttcgtctgtaagccgacccgtgcgaactttccaagcagataggcttcttcatttgtaattgaggcgctcccgtagacggccatcgcatcattgccgtgttcggtttggatcagattgatttgttcctttatgcgattcagcgcttcagcccaagagacaggcacaaattcaccgttttttttaagcagggggcgtgtaatgcgggaagagtgcacggcatgctgatgggcattcatgccttttgtacataaacggccatgtgtcgtcggattatcaatgccgattgcagtgtatttcttccgtgccgcgaaggtttgttccgtaagctgcattttgcattgcatgctgcagaacgggcattgcgtctcatatgttttttccgattggacatcttgcagtttgtcacggaaataacggagcatcggttcagtcaaaaagcttcatcctttcgtatggcgttttcccggcagacaggttttgcagcagggatatgtctgaacagagatttttcagaagctgtgtccgcatatcttcttcaaacagtatttctctgatatggacgaggccgagtctgtcaacccattgataaatcgcttcgttgtagtgagccgtttcgcgataatattgaataaggcctttcatcatagcggcggtactgtcttcgttatccgtcacacaaaaaaggctgccggcgcgggcttgttttccgcggacgcccccgatataaatctcccagccagtttgtgtctgaagcgcgccgatatcctgaatgtaagcatcggtgcaattgttttcacatgacaagctgacggatacataagcgggtacggcaagtgtgtcggtatctcgttcaatcctgcttgccagctcttgaaaggagcgatgctgtccgcacgtacatgctttgatttgaatcgtccagcggtgccggggggagaaaaccggcatgttcagtgcttttctgatgcttgcaaggtcatttggcctgattccggaaagcctcagccggtgactgtcagtcatcgaaacctcggggatgccgtatgcttcgatgacgtttgcgatgtttttgagctctgccgcacttgtcagtccgccgtacatttgcggaatcagggtgcatgtctcttctgccgatatttcattgaactgcataaaatcaggccgcgtcctttccaagtaatagtgaagcgccggaatacaaatgcggcagccgttttctgttttccagccgctctctctcattacctcggcggcatcagtgaacggacggcgccgaatttcggcgatgacttcttcttccgtcaaatcggtgcagccgcaaaacgaaggctggcgggagggttttgtgtaatcatcgctcgccatatacttcagcaagtcttcaacgagcggcctgcatcctccgcaagatccggacgcttttgtcatgtgcttcacttcctccgcggtttttaagccatatttgttcaccgcttcttcaatggagcccttggtcactgagctgcattggcaaatggtttcatggggaggcatggattcaaaggatataccgccctgatccggttccatgagctgttttttcacgatggaaatatctctttgcttcacaagactgtcgagaagccgctgtttaccgcgcgtgtccccgaataaaataaagccggccggtttatcgtcctcaaagagcgcttttttgtagatgcctgcatgctcatcatggaacaatatgccggctgtgtgctcatcctcgtgcacctttcctgccgaccatacatcaataccggctatttttaaggctgcagattgtgcaaagccttgaaacccttcgcacgggacgccgcatagatgctgcgcgagcacttttccctgttcataaagcggcggcgccaatccgtatacaatcccgtcatgctccgcgcattcaccgacggcatacacattcggtttgttcgtctgcatgaattgattgacgatgattcctctgttcactgaaagtccggcagatggagccaatcggatattgggcctcacaccggcggccatgacaatcaggtctgcttctatggaagaactgtctttgaaacgaatgccttccgcccgtgagttccctgtaatggatgccgtgcctttctctaaaagaaagactaagccttttcgttccagctctttctgcagcaggcgggatgccgtttgatcaagctgtttttgcataatggcggaagagtggtgaatgacgctgacgtccatgccgagctgccgtaagccgacggccgcttcaagacctaataaaccggcgccgatgaccgccgccttttgataccggccggccgcattgataagggattggcagtcttctattgtccgaaagccgtacacaccttctttatctgctccgggtatggggagaatataaggagaggagcccgttgcaaggatgatttgatcgtaagtcatgctgcgcttccgatccgttgtgacaacctgccgttctgtatcaatgtgtacaaccgtttctcccgtgtaaagcgtaattccgtttttttcgtaccattcgcggctattcagcgtaatgtcatcaagcgaaacctcaccttgtaaaacggaggataagagaatgcgattgtaattgggatgaggttcgcttccgaaaatgacaatctcaaacatgtcacggttcatctttaaaatgtgttcaatacagcggattccggccattccgttccctgctgcaattaatcgttgtttcttcattcgccaaacctcctttgcagctgcctgtaagattgcttctctatgagaaattatggcacattgcctgattaacgcattaaatgtgtcgcattatcttacacatgtcttttccggtgaatgccggtcatatattcttgattcagcaatttgaaatgatagaagaccggaaaggagaatgttatgaagctgtcggaattaaaaacaagcggtcatccgctcactctgctctgttccttcttatattttgatgtgagttttatgatttgggtaatgctgggggcgctcggcgtttatatttctcaggatttcgggttatcttcttttgaaaaagggtttgtcgtggctctgccgatcttatcaggatctgtgtttcggatcattttaggtgtgttaacggacaggatcgggccgaagaaaacagccgtgatcgggatgctgatcacgatgatcccgctgctttggggggcattcggcggccgttctttgactgagctgtatgcgatcggcattctgctgggcgtagcgggcgcaagttttgctgttgcgcttccgatggcgagccggtggtatccgcctcacttgcaggggcttgcgatggggatagcaggtgccggcaacagcggcactttgtttgcgacattgttcggtccccgccttgcggaacagtttgggtggcacagtgtaatgggaattgcgcttcttccgttgatgatcgtttttatactgtttatcgtcatggcgaaggactctcctgcacagcccgcaccgcagccgcttaaaaactaccttcacgtgttcaggcagaaggaaacatggtgtttctgtcttctgtacggcgtcactttcggaggttttgtgggattatcaagttttttggcgatttttttcgttgatcaatatcaattgtcaaaaatccatgccggtgatttcgtcacaatatgtgtcgcagcgggcagtttttttcgccctgcaggaggctggatttcagaccgggcgggaggtgcgaaagttctggctgtactgtttgtcatcgcggctctgtgtatggcgggagtgagcagcctgcctccgctttcaacggtgatcgttctgctgtttatcggaatgatggcgctcggtatgggcaacggagcggtatttcagcttgtccctcagcgctttgcaaaagaaatcggaatggtgacgggaatcgtcggagcagccggcggcatagggggttttttccttccgaatattttaggatcattgaagcagatgacgggaacttatgcgatcggttttatctctttttcatgtatcgcattgctcgcatttgtgcttgttctggccgcaggctatttttggagaaaaagctatggcactgaaaacagtcctgcggatgtttaagtttgggcggaagacacgtatgacagcgtgtcttttttatgattgattatttttcacttgattttaaacggagaatacatcagaataaatagtaacgattacgatttataataatgtacatcatggtgataataaggcaggtgcggggtataaatcgtaatcattctattttgtcaggaggctattttatgaaaaaaattccggttacagtattgagcggctatcttggtgccggaaagacgaccgttttgaatcatattttacaaaaccgcaacggtttaaaaattgccgtcatcgtcaatgacatgagcgaagtaaatatagacgcgggcttggtgaagcagggaggcggcttgtcaaggacggatgagaaactcgtagaattatccaacggctgtatctgctgcacgctgcgtgaagatttattagtcgaagttgagaaactcgcgaaagacggcagatttgattatatagtgattgaatcaaccgggatcagcgaaccgattcccgttgcccagacattttcttatatagatgaagaaatgggcattgatctgacaacattctgcaggctggacacaatggtgaccatggtggatgcaaaccgcttctggcatgatttccagtccggtgacagccttcttgaccggaaggaagcggcgggagaagaggatgaacgggtgattgccgatttattaattgaccaaatcgagttttgtgatgtgctcattttaaataaatgcgacatggtcggcgaaaaagagcttgaacagctggaaacggttcttcgcgcattacagccccgtgccagactgatccggtccgtccgcggagaagtgcccgccgaatacatattgaataccggtttatttgagtttgaggaagcgagttcatcagcaggatggataaaggagctgacggcaggtcatgaagcgcacactccggaaacggaagagtacggtatcacttcgtttgtgtactcgcggcgtttgccgtttcataccgttcgttttgacagctggctgcatcaatcaatgcctgacagcattgtgcgcgcaaaaggaattgcttggtgcgcaacccgcaacagccttgcgctgctgatgtctcaggcgggtccggcggtttcgattgagcctgtttcttattgggtggcggcaatgccgaaacttgagcaggagcagatcaaacagcaggaaccggagattctggaagattgggacgaccaattcggagaccgtcatacgaacctggtgtttatcggaacagatttagatgaagcagccattacaaaggaattggatcagtgcctgctcacgccgtctgagttcgattccgattggtcgcagcttgaagatccttttcaatgggatattcagcgggccgaataacataccggccaagtttagaagcaggtgaaaagggaaggagtgatgaaaaaggagctgaccaagtgtgaaagcactgacataccaaggaaaagaacatatggaagtgaaagaagtcccggcacccgccattcaagatgagagagatgtcatcgttcgaatcaccgcaaccgggatatgcggttcagaccttcatttatataaaaacggaatacccgccgatccgggttataccgtcgggcatgagccgatgggaatcgttgaagaaacgggcagtcaagtcaaaaagctgaaaaaaggcgaccgggtcgtgattccttttaacatcggctgcggagaatgtcattattgcaagcaccagatggaaagccagtgtgatgaatctaatccaaatcctcatacagatgccggcggcttattcggtttttcggagtttaacggtaattatcccggcgggcaggctgaatatttacgtgttccttatgctgatttctcttcttttctggttccggcagacagtgagcttgaagatgagcaggtgctgcttctgtcagatgtcatgccgaccgccttttggagcgtccagcacagcggagtgaaaaaaggagatacagtcgttattctgggatcaggtccgatcggtttaatggcgcaaaaattcgcgtggaaaaaaggagctaaacgggttatcgcagttgatcaagtcccgcaccgccttgaacatgcgagacgcataaacggagcagagaccttcaatttttcagaacatgatgagatcgggaaactgctgcatgaacatacgtcagggggcgcggatgtagtgattgattgtgtcggaatggacggcacgccgctttcaaaagaaaaagcagagcaaaaaccgaatcagttcggaacgatcagtccgattcttacagcatcagaagccgttaagaagttcggaaccgtgcagctcacgggcgcatacatttctgaagcggacggctttccgctcggtgattttttcacacgcaacgtttctttgaaaatgggccaggcacccgttattcatctgatgccgatgctgtatcaaatgatcgaacaaaatgaaattgatccgacggatatcattacacacaaaatgagtcttgcggaagctcctgctgcatatgatatatttgacaaaaaagaagatggcaacattaaagtgattttaaagccatagcgaggagaaacacgatgaatatttacagaccggcgggattttggatcagattgggagccgtggtactcgactatttaattacttcagtgcctttggcgattatttttatgctggcaacaggaaaagatccgaatgagagcacaatgatcagcatcattttgactctttatgctattttgctccctgtatactggaacggttatgttatcggcaaaaagatctgcggtatccgcatcgtcaaaaaagacggcactcaggtaggctttctcactatgattttgagagtgcttgtgggcggcctgatatatggcgtgacgtttggaatcggcgtgatcgtgagcgcattcatggtcggaatgagagaagacagacggtcaatccacgattttgtagcgggaacgtatgtcacatacgcgctgccggacgaatcgattgaaaagagcgaataatttcgctcttttttttgcataaaaaatggatgagggagcaacatataacaaacgttaaaggaggaaagagtcatgaaaaaagctgcattgtctttagctgcgtttttcattacagcaatggttttcacaatgccggtaaacgccgccggaacaaaaatgccttcaacaatgtcactcacggaacagcagaaaaaagaaattgaatcacttgaaaaagaagtgctcgaaaaacgaaaacatgttatatccaaatatgttgagtacggggtcctgccgaaagaaaaagcagaacatattaaacagcatatggacaggcgctttaacatgatgaaacaaaatgggtttgtcccgaagcctccgcctcataaattggaaaagcggcatcatcattcttaagcatccggcaagccggatgcttttttgtttttatcgggattgctctgaaacgcgtttcataacgtatgatatcaatatcatacgcatcaggaggatgaaacacatgatacataaaaaacagggcctgttccctgatacatttctatgggggtcagcctcggctgcctatcaggttgaaggagcctggaataaagacggtaaaggaccttcagtatgggacttattcacgaaaataccgggtaaaacgtttaaaggctcaaatggcgatacagcagtcggccattatgagcgttataaagaagatatcgccttgatggcagaaatgggtttgaaagcttaccgcttttctgtcagctggccgagaatttttccgaatggcagaggggaaatcaacgaatcagggatcgcattttacgaagacctgatcgatgaattgatttctaacgatattgagccggtgctgactctttatcattgggacttgcctcaggcgctgatggatgaatacggcggctttgaatcaagaaaaattattgatgattttaatgattactgcattgcgttatacaaaagatttgccggcaaggtgaaatactgggtcacgttaaacgagcagaattataattttcataacgggtttattacagctgcacatccgcccggcgtaaaggacagaaaacgattttatgaagcgaatcatatcgcatttttagctaatgccaaagcgattgaatccttcagacaatatgttcctgacggcatgatcggcccgagcttcgcttattcaccggcttatccgcttacaagtcatcctgaagacataactgcatttgaaaacgcagaggaatttatgaatcattggtggcttgatatgtattgccgggggacttatccgcaaattcctttcaattatttaaaggaaaagggctgggcgcccgccattgaagccggggatatggaattgcttgcaaaaggcaagccggattttatcggtgttaattattatcagacgattacgtacgaaagaaatcctcttgacggtgtatcggaggggaaaatgaacacgactggtcagaaagggacaaaccaggataccggtataccgggtctgtttaaaacgaaaaagaattcgaacctcgtgacgagtaattgggattggacgattgacccgataggtctgcgcatcggcctccggcgtataacgagccgctatgagctgccggtttttataacagaaaacgggctgggggaattcgataaaatagaagaagacggctcaattcaggatgactacagaattgactatttacgctcccatcttgaacagtgcagagaggccattagtgacggagttcatctcatcggctactgcagctggtcattcacggatctgttaagctggctgaacggctatcaaaaacgctacggttttgtctatatcaatcgagatgaagaagatgaaaaggatttgaaacggatcaggaaaaaaagtttttattggtaccagaatgtaattgaaacaaacggtaaaagtttataaaagttccctgagagaaataagattctctcagggctttcttttacattgaggctgcatcaataatatacgtatccgcatgaagatcggatatttcggcaggcactgaataacaggtaaggctgtatcggcctttcggaatatgaaagaaaagccgctttgacatcacgctttcaatctcaattccatcttttacagcctcaaagggaacagtcgcttttttctcataggatggtaccggttcacttgtgttaagcctgaggacgataaatgccctcgtatttctccttgcttcaaatgaaacagctccgtcagcttccgcatatcctttttcaatggcttcatcggtccaatcgataacaggcggttctgaatctttttggaagattgtaaattgatgataagaaatggccagttcttgcggtttccatgatttattcaatgcgctgttcctcctgtttttttacttgattttaaataatactctcgttccgtcgggatcattggtaagctggtgtccgacccaagagccggctccgcggttgtctgccggagaaatatattctacggaggcgttatttccgccctgtttacaaaccgccatcggccattcatccctatcgtatcccgttttgacaggcacatgtttaagagattgctcacgccgcttatgtactccgtctctgtcaatggtgcatatgctggaatgtccttcttttatcgcgtccttaatatgctttgctgtttccggatatcgatcggacggaaataagattactttgtcgtaatcactcttctgaacggtctgctcgttatctgagaaaagatcacccttgatcagggccgcgactgctccggcaatgatgataagaacaagcagcagtgcttttaatgttttcaagagtatcaatcacctccagttttaattgctgtaaagctggtccaagaataaagcagaatcggccggctgtaaagctgttaaaatatatttctcagccgcaattcagctgaatatctgtaaaaccatccgcacaaatcaactttattcattaaaaattcgatcagaaagtgttttttgccgtttccctattcagaaatgaatggttgcggccgtatcgtcaattgacttattatagcgataagctcaccggcaggatattttcgttgcgagtgtccgacccgaaaaccttggcctgcatgaccgggcgcaacaagacgataaaaagacggccatctgataagaaggccgtcagcaaatcattccagattcgcatgctttgtaaacatgtctgctgaattcaattcttttttctccatgatttttagaataaccgcatcgtaaaacagcagaagagtttgttcgaataaagaacccatcggctgaatcgtctttctgtctccgccggtctcttccttaggagagccgggaatcgttattgtaagatccgcaagtttgccgagacttgagtcggggttaatcgttaatgcagtgatgatgccgttaaggcttttggctttttcagccgtatgaagcagactttttgtttcgcctgagcctgagccgatgatgacgagaccgccttcttggaggggaggggtaagcgtctcaccgacgatgtaagcgttcagaccgatgtgcatcatcctcatggcgaacgctttagccataaagccggaacgtcccgctccggacgtgaagatttgatctgccgataaaatctgatccgcaagcttgtcagcttcactgtcggatattaatgctgcggtgcgggatatttcatttagtatttcatgtaagtattcagtcgttttcatgatccttgtgtaatcagctgtttcattttagcagcagcatccgctttattgtcagctcccgtaatgcctccgccgacaatgattaaatctgggttttgtttgatggcttcaggaagcgtatcaagtttaatgcctccggcaattgcggttttagcgctcttgaccgcttttttaatcgccgtcagctcctcgaatgaattttttccttctgcttgaagatcataacccgtgtgaacacaaatataatcaacaccgagttggtcaatttcttttgcccgtgtttcaaggttttttacgttaatcatgtcgacgaggatttttttctgctgtttttttgcttcggcaaccgcccctttgatcgttgagtcgtctgtcgctcctaaaacggtgatgatgtcggctcccgcttctgccgctttcataatctcgtaaccgcctgcatccatgattttaagatcggcaagcactttcaagtgaggaaaggctgttttcatttcctgcacggctttcagtccttcattaatgacaacgggagtgccgatttccacaacatctatatatggttcgacctctttcacaagttcaattgcttccgggatattcactaagtctaatgccagctgtaattccactttatatccactcctcttttttatgtattttcattctatagagtgccccgcatgttgagaagtacgcactttgaagtctaatagttactttgaggatactgtccccgcaggcaatgcgctttgtttcagcaaaactgcgtggtagtataaactgatgaaagttgtgtgaaaaagtaagcgtgtatgaatagatgatgaccgtacaaaaagtaagaggaaggagcattgtccgtgagccgaatggatgagaaaacgtttaattgcgaaaaggaattgacgcttgccgtgataggcgggaagtggaaaatgctgattatgtggcacttgggaaaagaagggacgaagcggtttaatgagctgaaagctttaattccggatattacgcacaaaattcttgtgaatcagctcagggagctggagcaggatctgatcgttcacagggaagtttaccctgtcgtccctccgaaagtggagtattctttaacggcgcaaggagaaagccttatgccgattctggacgccatgtataagtggggaaaagattatatggaattaatcaacattgataaaactgcaataaaggaatctttttgaagtgctctatgtaaaatagagtgctttttttgcggtttaatgaaatcatattgcgaacattcggaccgtctgtttcggttcttgcgctgttttttccgggtcagcttacgtacgtaaatttttttcattctgccataactggatattcgacaggttttcattatagtttaaagatttttaattttacgtaaataatatttttgaaaataaattgcgggatgccgcaaaataccctctggatttgtcggaatttttttcggtgtgccgcatgaaacttttcacccatttttcggtgataaaaacaatattttcatataaagtgaacgtaagtagatatatagaaatacatgcagaaataggtaaacctttcgtgcttacaatcaatggctttttgtcttgatttctcataaatttgatgccgcatttcggactgcgcgggtgaacggatgacggatttcggcggtgattgaatcgggatcgtttttggaggtaagtggttcttttggcttgagaatgagttagggacatagagggaggctgtttctaagggagaattgacatctttatcttaaaaaggggaggcgcacacatatggaaataactttttatcctttaacaaatgctcaaaaacgtatctggtatacagaaaaattctatccgaacacaagtatttcaaatcttgccgggttcgggaaactcatttctgaagaccgcgtacaggctcattacgttgagaaagcgatacaggaattcgttcggcggtatgagtcgatgagaatccgtctgcggcttgatgatgagggggagcccgttcaatatgtgagcgaataccgtccgctctctatcgggcacacagatatcaggcaagccggctgctctgcggacgagctgtccaaatgggggcgtgaagaagctggcaagcctctggcgttatatgatcaggatttattccgtttttccgtgcacacgatcagtgaaaatgaggtctggttttacgctaatgtgcatcacattatttcagacgggatttccatgacgattctgggcaatgcgattactgatatttatttggagctttcaggcgggacaagtgaggaacagacggagattccttcttttatcgagcacgtgctgacagagcaggaatatgtgcaatcgaagcggtttaaaaaggatcgggatttttggaacgggcagtttgagaccgtgccggagcttgtgtccctgaaacggagccaggcagatgcgggtcttggtgcgaaacggttttctcaagaaattcctcacgacttatatggccgcattcattcattctgcgaggagcataaagtcagcgtactatctctgttccagtcagctctgatcacttatctctacaaagtgaccggccgggatgacgttgtcacgggtacgtttatgggaaaccggacgaatgcgaaagaaaagcagatgctcgggatgttcgtatctacggtgcctgtgcggacaagcgttgacggaggacagtcgttcttggaattcgttaaaggccggatgaaggatctgatgaaaattctccgccaccaaaagtatccgtataacctgcttgtcaatgatttgcgcgcttcgaaaagttcgctgagcagattgtttacggtggctctggagtaccaggtgatgcagtggcagaaaaaagagaatctgtccttcctgacagaccctattttcagcggaagcggtacaaatgatatttcaattcatgtgaaggaacgatgggacaccgggaaattgacaattgattttgactatcgcagcgacattttcaagggggaagagattgaatctgtttctgaacgtttgatcacgctgatagaagatgcgatttcatctcctgatcgcataattgatgaacttactcttctttctgaatccgagaaagagcggctgttgaaacgggcctccggcaatccggtgaattaccgcggagagatgacgataccggggctgtttgaagagaaagtgaagtcactgtctgacaaacccgcggttgtgtatgaaggccgaacattgtcctatcgcacattgcatgaacagtcaggccgtatcgccggacgccttcttcaagccgggatatcagccgattctcctgtcgcggtgctgcttggccgttctgagcgtgtcattgccgcaatattgggaattttgaaagcgggcggcgcctatgtgccgatagatcctgactttccggcggatcggattcagtacattttggaggacagcggagcgaaggctgttctgacggaggccggaatacaggcgcccgcagcggatgccgaacggattgattttgacgaggctgttcagtatgagacggctgcggacggtgtcagcacacaatcagaccggctggcttacatcatctacacatcaggtacaacggggcggccgaaaggcgtgatgattgagcaccggcaagttcatcatctggtgcaatcactgcagcaggagatttatcaatgcggtgagcagacattaagaatggcgcttttggctccgtttcattttgatgcgtccgtcaaacagatttttgcctcgcttcttttgggacagacgctttatatcgtgccgaaaacgactgtaacgaatggctcggcactgctggactattatcgtcaaaaccggattgaagccactgacggaacgcctgcgcatctgcagatgatggttgcggcgggagatgtcagcggaattgaattgcgccacatgctcattgggggagagggcctgtccgccgctgttgctgaacagctgatggcgctctttcatcaatcgggcaggacgccgcgtctgacgaatgtctacgggccgacagaaacgtgcgtagatgcgtccgtgcatcaggtgtcagcggataacggaatgaatcaacaggcggcgtacgttccgatcggaaaaccgctcggcaacgcccgtctgtatatattggataagcaccagcggcttcagcccgacggcacggccggtgagctgtatatcgcgggtgacggtgtaggccgcggctatttaaatcttccggatttgaccgcagagaagtttttgcaggacccgtttaacggaagcggccgcatgtaccgcacgggtgatatggcgcgttggctgccggacgggacgatcgaatatatcggccgtgaagatgatcaggtgaaagtccgcggctaccgcattgagctgggagaaattgaaacggtgctcagaaaagctccgggcgcggcgcaggccgtcgtgctggcacggccggatcagcagggcagcttagatgtctgcgcatatatcgttcaggaaaaaggaaccgagtttcaccctgccgagtacagggagtatgtgtccaagcaccttcctgattacatggtgcccgcttactttacaaaaacggacgaaattccgctcacgccgagcggaaaggcggaccgcaaaaagctgtttgcgcttgatgtgcaggctgtcagctcatctgaatatgccgcgccgagaaatgaaacggaggaaacacttgccgtcatctggcaggaagttctcggaatggacaaggcgggcatttatgatcatttcttcgagtcaggcggtcattcattaaaggcaatgacgcttctgacgaaaattcataagcaaatgggcgttgaaattccgctgcaatatttgtttgagcatccgacgattgcggcgcttgccgattatgcggaaaaccgaaacgaaggaccggcattcagtgcaattgagccggctgagaagcaggcgagctatccgctttcgctcgctcagcagcggacttatatcgcaagccaatttgaagacgcgggagtcggatataacatgccggctgcggccatgattgagggcgctttagaccgtgaaaagcttgagcgtgcattttctgccttaatcagcaggcatgaagcgctcagaacatcgtttcaatcagaggacggcacgccgagacaagtgattggcgagcatgttccgtttcatattgaaatgatcgaagcgcgcggaagaacgaatgaacaggtcatgaaggactttgtgcgccgttttgatttatctgaggcgccgctgttcagaatcggcctgcaaacgctcggtcacaatcgccatatgctgctgtttgatatgcatcacctgatttctgacggggtgtctatttccatcatgctgaaggaactggctgacatctacggcggaaatcagctgcctgaattgcgcattcaatataaagattatgccgtatggcaggcggaacgggcgaaagcaggctacaagaaggagcgggcgtactggaaagaagtcttcagcggcgaactgccggtgcttcagctgctccctgattatccgcggccgcaggtgcaaagctttgaaggtgaccgcgtgtccgccaagctgccgaaaatgctgcgggaacggctgcagaagcttgccgagaaaaacggagccaccctttacatggtgctgttatcagcatactatacgctgctttctaagtattcgggacaggaagacatcatcgtgggaacaccgtcagcgggaagaaatcactccgataccgaggggcttatcgggatgtttgtcaacacgcttgcgctgcgaagctccgtgaagcaggatcagacatttgccggcttgttaggtcatgtgcgcaagcaggtgctggatgcgttttctcatcaggattatccgtttgagtggctgaccgaggagctgaacgtgccccgggacatgagcaggcatccgatatttgacacgatgttcagtctgcaaaatgcttcggacggaattgcggagatcggtaatctgacgctgtctcttcatgaaacaaacttcaatatcgccaaattcgacctgaccatgcaggctcgggaaacagcggaaggcattgcgcttgatttggattattgcacgaagctgtttaagcgctcaactgcggatcgcatgcttgcgcactatgtccgtctgctggagagcgcggcagctcagccggatgcgaaaatcagcgaatatgatctgctttctgaacgggaggctttgaatcaattacagcggttcaacccggaacgcacggtatacccgaaagatcaaacgatcgtgcagatctttgaagaacaagcccgaaagaaccctgaccggacggctctacagttcgaaggggaaaccctgtcgtatcagcagctgaatgaacgcgccaacaggcttgcgcggcatattctttcggtcggaggcggcggaaaaaccgcggctgttctgtgtgaacggtcaatggatatgattgtttccattatggctgtgttaaaagcggggtccgcctatgtgccgattgatcctgagcatccggttcagcggattcagcatttcttctgcgacagcggggcgaatgtgctcctgactcagcaaagcctcaagccgcttgcggaaaaggccggttttcaaggcgtcattgtgcttgctgatgatgaggcgagctatgaaaaggactctcgcaatccagcattgccgtttgattccaaaacgattgccaatctcacttatacatcaggcacgacgggaacgccgaaaggaaacatcgtcacacatgccaacattttgcggacggtaaaaaacacgaactatttgactgtttctgaagaggacacagtgctcggtctgtcaaactacgtttttgacgcttttatgtttgatatgttcggttcgctgttaaacggtgcaaagcttgtgatcgtcccgaaagatacggtgctggatatgtcacgcctgtcccgtgtgatcaaacgggagaacgtcagcattctgatgattacgacggccctgttccacctgcttgttgatatggagccgtcctgtctgacgacgcttcggaaaatcatgttcgggggcgaaagagcgtctgtagaacatgtcaaaaaggcgcttgcggcagtcggaaaaggaagactgcttcatatgtacggcccgtcggaaagcacggtgtttgcgacataccatccggtggatgtcattgaagaggatacgctctccgttccgatcgggaaaccggtcagcaatacggaagtctttatcatgaactcagccggacgcattcagccggcgggtatcgcgggagagctgtgcgtcagcggggaaggactcgtagaaggctactacaaccgtcctgaactgacggaagaaaaatttgtaaagcatccgtttaaggaaggtgaacggatgtataaaacgggcgacttggccagatggcttccgaatggcgatatcgagtttatcggacgtatcgaccatcaggtgaaaatccgcggtcagcggattgagcttggcgaaattgagcatcagctccaaagtcatgaccagattcaggaatgtattgtgctcgctgtagatcagggtgcgggtgacaaacttctttgcgcgtatgttgtcggcctcagggaaatctcttcccgggagctgagggagcatacggcgaaggatcttccggcttatatgattccgtccgtctttattcaattggatgaactgcctcttacagggaacggaaaaatcgacaggcgggcgctgccgatgccggatgtgaccgcagcgaatgccgtgtcatatacggcgccgcgcaatgaaacagaacaaaaactggcggatatttgggctgaggtgctgcaaatggagcgggtcggcgtccatgaccagttctttgagatcgggggccactcgttagcggggatgaaactgctggcccttatccagaagacattcggcgtgcagcttaccttaaaggatctgttcacttctccgacggctgcggggctggcgcagctgattgaagggactgagcggaaggcggctgagagcatcgcaccggcggccgagcgggaaacgtatccggtttcttcaccgcagaagcggatgttcgtgcttcagcagctggaaggcgctgaaacaagctataacatgccgtctgtgctccgcttaaaaggaaagcttgatgcagaaaagctgaaatccgtcatgaaacagctgacagaacgccatgaagccttcagaacgacatttgacataaaggatggggaaacggttcagcgcatatggacggaagctgatatcgacatggaatattatgaagcctctgaagaagatgctgaacggattattcagagctttatccggccgttccgcctggatcagcttcctctcgtcagaacgggactggtcaagctggctgaacatgaccacctgctgctgtttgacatgcaccatatcatttcggacggcgcttcagtcggcgtgctgatagatgaactgtcccgcttgtatggcggcgaaacgcttgagccgctgcggattcattataaagactatgcggtatggcagcagaaatttattcaatcagagcagtaccgcaagcaggaggagcattggcttcgggagcttgacggcgagcttccggtattgacgctgccggctgattacagccgtccggccgtgcaaacctttgaaggagacaagctggtcttttctctgactgaggaacagacgtcggctcttcgcagtcttgcgaaacaaacggattctaccatgtacatggtgctgctggcgacatacagcgcctttctatcaaaactgagcggacagcatgacatcattgtcggctcgccggttgcgggacggtcacatgcggatctcgcaaacgtcatcggtgtttttgtgaatacactcgcgcttcgtacgtatccggaagcggacaaaacgttcacggactatcttaaagaagtaaaacaaaccgctttacatgcatttgacgcgcaggattatccgcttgaagaccttctgcaaaaggttgaggtgcagcgtgatacgagcagaaatccgctgtttgatgcggtattctcgatgcaaaatgcaaatgcggaagatctggtcatggaaggaattgagctgaagcaccatccgtttgacagaaaaacagccaagtttgacctgacaatgacggctgaggacacagacgaagctttaacgtttgtgcttgaatataacaccgcgctgtttaaaccggaaacggcagagacatggaagcattactggcttcaactgttagaagccgcagcggaaaatccggctgcgaagctttctgagctttcattggtgaataaaacagaaaaacaagctctcctcaacgcatggaagggaaaaacactttctgtgccgcgggacaaaacggttcaccgtctctttgaagatacggccgcccgctacgcgaaccggccggccgcggcatacaacggcgcgaaatggacgtacggcgagctgaacgcaagggcgaaccggatcgcgcgcattctcatggactgcggcgtcacggctgacgaacgtgtcggcattttgacgaaaccgtccttggaaatggccgcgggcgtactcggcgtcctgaaagcaggcgcggcatttgtgccgattgatcccgactacccggaagagcgcatcagctacattctgcaggacagcggcgccaagcttcttctcacacaggaagcgctgggcgtgccggaaagctacaaaggagaaacgattctgcttgacggcggacgctccattctgagcctgccgcttgatgaaaacgatgaagcgaacccgcagacggaaacaacggcggatcatctcgcttatatgatttacacgtcaggaacgaccggacagccgaagggtgtcatggtcgaacaccatgccctggtgaacctgtgcttctggcatcacgacgcattcgccatgacggcggatgataaaagcgccaaatacgcgggcttcggttttgacgcctccatctgggaaatgttcccgacatggaccatcggcgcggagcttcacgtcattgacgaagcgatccggctggatatcacccgcttaaatcactatttcgaagagcacggcgtgaccatcactttcctgccgacgcagctggccgaacaatttatggagctggaaaatacctctctccgcatgcttctcgtcggcggcgacaagctgaagcgggcggtgaaacagccgtacacgatcgtcaacaactacggcccgacggaaaacaccgtcgtcgcgacaagcggcgtcatcaatccggaggaaggatcgctttcgatcggacgggcgattgccaatacgagagtttatattctcggcgacggcgatcaggtgcagccggaaggcattgccggtgaattgtgcgtggccggccgcggtctggcgcgcggatacctgaaccgtgaagaagaaacggcgaagcggtttaccgcagatccgttcgtgcctggcgagcacatgtaccggaccggcgacctcgtcaagtggaacgcgcagtgcggcatcgaatacatcggccgtatcgaccagcaggtcaaagtgcggggctaccggatcgagctttcagaaatcgaagtccgcctcgcccagcttgcggatgttcatgacgcagcggtgacggccgtggaagacaaagcgggcaataccgcgctttgcgcctatgtcgcgcctcagcaggacgatattgaagcgctcaaagccgcgctgaaagacacgctgcctgactacatggtgccggcgttctgggtggagatggacgagcttccggtcaccgcaaacggaaagattgacaaaaaagccctgccggcgcctgacattgaagcgggaagcgccgcgtacaaagcgccggaaacggagatggagacgctgctttccgacatttggcaggaagtgctcggtcttgaccggatcggcgtaagcgataatttcttcacgctcggcggggactcgatcaaaggcatccaaatggcgagccgcctgaaccaacacggctacaagctggagatgaaagatctcttccagcacccgaccatcgaagagctcgtctcgtatgtggagcggacggaaggcaagcaggccgaccaaggccctgtcgaaggcgaagcggacttaacgccgatccagcgctggttctttgaacgaaactttaccgacaaacaccactggaaccaatccgtcatgcttcacgcgaaagacggctttgatccggacctggtggaaaaaaccctgcaagcattgattgaacaccatgatgcgctccgcatggtttactgtgaagaaagggaaggcatcattcagacatacctccctgtcacagaatgcaaggcaagctttgaaatcgttgatctgtacggaactgacgaggatatgctgaaaagccagattcagcggcttgccgatcatcttcagggaagtctggatctggagaacggcccgctgttaaaagcggagcaataccggacagaacaaggcgatcatctgttaatcgcgattcaccatctcgtcgtggacggggtttcatggagaattctgcttgaggatttcgcttcaggttataaacaggcgcagcagcaaaacagcatcgtcctcccgcagaaaacccactcctttaaagattgggcggaggcgctgaacacatttgcgcaatcagaagagctgaaaaagcaggcggcttattgggcgcaggcagatacggaagaactccggccgctgccgaaagaccatgatccgaacaaacggctcgtcaaacatacggcggccgtgaaatgtgaattgactgaggaagaaacggcacagctgctcacagatgttcatcatccgtacggaacggaaatcaacgacattctgctcagcgcgctcggcttaacgatcggtgaatggacggaaaacggcaaagtcggcatcaacttagaaggacacggtcgggaagaaatcataccgaatgtcaatatttcacggacggtcggctggtttacggcccaatatcctttgattctgcagatcagcaaggaagacggcgtctcttccgtcattaaaacggtaaaagagacggtgcggcgagttcctgataaaggcgtcggttacgggattctccggtatctgtcatccgatgaaacagaaaaaggcgccgcgcctgaaatcagttttaactacttggggcagtttgacaatgaagtgaaaacggaatggtttgagccgtctccatatgatatgggacgtcaagtcagcgaagagtcagaggcgttatacgcactgagcttcagcgggatggttacaggcggccgcttcgtcatttcctgctcatacaatcaggaagaatatgaaagaagcaccgtcgaaacacagatgcagcggtttaaagacaatctcttaatgatcatccgccattgcacggccaaagaggagaaagaatttacgccgagcgatttcagcgcgcaggatcttgagatggatgaaatgggagacatctttgacatgcttgaggagaatttaacgtgacaaaaacagataacagaaggggggagcggagcagatgagccaattcagcaaagatcaggttcaggacatgtattatttgtcgccgatgcaggagggaatgctgtttcatactctcctgaatcccggccaaagtttttacatcgaacaaatgacaatgaaagtaaaaggcagcttgaatatcaaaagccttgaagaaagcatgaatgtgatcatggaccggtacgatgtatttcgtaccgtgttcattcacgaaaaagtaaaaaggccggtccaagtcgtattgaaaaaacggcagtttcagatagaagaaatcgatctgacacatgtaacggacagcgagcaaacagccaaaatcaatgaatacaaagaacaggataagatcaagggctttgatttgacgcgggatattccgatgcgggcagccatttttaaaaaatcggaagaaagctttgaatgggtgtggagctaccaccacatcattttggacggctggtgcttcggcatcgtcgtgcaggatctgtttaaggtatacaatgccctgcgtgaacaaaagccgtacagcctgccgccggtcaaaccgtataaagactatatcaagtggcttgaaaagcaggataaacaagcatcactgcattactggcgcgggtacttagaaggttttgaaggacaaacgacatttgcggagcaaaaaaagaaacaaaaggacggctatgagccgaaagagctgctcttctcactgccggaggcggaaacaaaagcatttaccgagcttgcaaaatcgcagcataccactttgagtacggcgctgcaggcggtttggagtgtattaatcagccgctatcagcagtccggcgatttgatcttcggcacagtcgtttccgggcgtcccgcagaaatcaaaggcgttgaacatatggtcgggctgtttatcaatgctgtcccgaggcgggtgaagctgtctgaggataccacatttaacggcttgctcaagcagctgcaggagcaatcgctgcagtctgagccgcatcaatatgtaccgctctatgacatccaaagccaggccgatcagccaaagctgattgaccacatcattgtgtttgaaaattatccgcttcaggatgcaaaaaatgaagagaacagtgaaaacggctttgatatggaggatgtacacgtttttgagaaatcgaattatgatctcaacctgatggcttctccaggtgatgagatgctgattaagcttgcctataacgggaatgtgtttgatgaggcgtttatcctgcgcttaaaatctcagcttctcacagcgattcagcagctcatccagaagccggatcagcctgtcaatacgatcagacttgttgatgaaaaggaaagagagcttctgcttaccggcttaaacccgccggctcagactcatcaggcgaagcctctgacagattggttcaaggaagcggtgaatgtaaatccagatgcaccggcgcttacgtattccggccagactctttcctatcgtgaattagatgaggaagcgaaccgtcttgcgcgccgtttgcaaaagcaaggtgcgggtaaggacactgttgtcgcgttgtacacgaagcgctcgcttgagctggtgatcggcattctcggcgtattaaaagcgggagcggcttatctgccggttgatccgaagctgccggaggaccgaatctcgtacatgctggctgacagtgcggcagcctgtctgctgacacatcaggagatgaaagaaaaagcggctcagctgccgtatacaggaacaacactcatcatcgatgatcaagcacggtttgaggaacaggcaagcgatcctgcagccgcaattgatcccgatgatccggcgtatattatgtatacgtccggcacaaccggaaagccgaagggcaatatcaccactcatgccaatattcaaggattggtcaagcatgtagactacatggcattttcagaaaaagatacgttcttatctgtttccaattacgcctttgacgcatttacctttgatttctacgcatcaatactgaatgcggcacggctcattatcgcagatgaacatacactgcttgatacagaacggctcactgatctgatccggcaggagaatgtcaatgtcatgtttgcgacaaccgcactttttaatcttctcatcgatgcgggagaggagtggctgaaggggcttcgctgtgtgttattcgggggtgagcgcgcgtcagtgcctcacgtcagaaaggcgcttgagatcatggggcccggcaagctgattaattgctacgggccgactgagggaacggtgtttgcgacagctcacgtcgtgcatgatataccggattccctttcctcattgccgatcggaaagccgatcagcaatgccagtgtttatattcttaacgggcaaaatcagcttcagccgtttggagctgtcggtgaactgtgcatcagcggaatgggtgtatcaaaagggtatctgaaccgtcatgacctgacgaagcaaacgtttatcccaaatccgttcaagccgggagaaacgctttaccgcacaggggatttagcacgctggctgccggatggaacaattgaatacgccgggcgtattgacgaccaggtcaaaatacgcggacaccggattgagcttgaagaaatcgaaaagcagctgcaggaatacccgggtgtgaaagatgcggtcgttgttgcagaccgccatgagtctggagatgcatcaatcaacgcctacctcgtgaaccggacgccgctttcagctgaagacgtaaagaggcacctgaaaaaacagcttcctgcttacatggtgccgcaaacctttactttcttagaggagcttcctttaacgacaaacgggaaggtcaataaacggcagctgccgaaaccggatcaggctcaggcggccaaagaatggatcgggcctcgaaacgcgacggaagaaacgattgcacacatctggtccgacatcctcggcagacagcagatcgggattcatgatgatttcttcgcgctcggaggccattccttaaaagcgatgacggcagcgtcgcgcattaaaaaagagctcggtacggacattccggtgcagctgttattcgaagcgacgacaattgcagacattgccggttatctgcttcacggtgaagaaaaaggaatgaaagatctcaccatcatgaataaaaatcagtctgacacactgtttgcgttcccgccggttctcggttacgggctgatgtaccagccgctggcaaaacagctgtccggctataaaatctgtgcgtttgattttattgaggaagacaaccgcatcgaacgctacacagagctgatcaatcagctccagccggaaggaccggtcaagctgttcggatactcggcaggctgcacgctcgcctttgaaacggccaaacgccttgaagcagggggccgtaaagtggagcggctgatcatggttgattcctataaaaaacaaggcgtcagcgacttggaaggccgcaccgtagaaagtgatgtccaggcgctgatgaaggtaaaccgggacaatgaagcgctgaatgacgaagctgtcaaagaaggtctcgccaaaaaaacaaacgcgttttattcttatttcgtgcataccgtcagcaccggcacggtcaatgcggatatagatcttttaacgtcagaaccggactttgcgatgccgccgtggctcgcttcgtgggaagaagccacgacaggtgaataccgtgtgaaaaaaggctgcggcacgcacgcagaaatgcttcagggagaatgtctcgaaaggaatgcggcatatttgctcgaattcctaaagaaggaacatctgaagctgacaacttcacgatagaaaaggaggaagcccgccaatggtccagctctttaaatcgttcgataccacagaaaaaacgcagctcatctgttttccgttcgcaggaggctattccgcatcattccgcccgctccacacctatcttcaaggtgagtgtgagatgcttgccgcggaaccgccgggacacggaacaaatcaaatgtccgccgttgaggattttgaacagcttgtcagtttatacaagcaggagttgaatctccatcccgaccgcccgtttgtgctgttcggccacagtatgggaggcatggtcgctttcaggctggcgcaaaagctggagcgggagggcatttacccgcaggccgtgatcatctcagccattcagccgccgcatgtggaaaggaaaaaagtgtctcatcttgatgatgaaaaatttctcgcccatattatcgagcttggcggaatgccgcaggagttagtggagaataaggaggtcatgtcatttttcctgccttctttcagatccgactaccgcgcgcttgaaagcttccgtccgtctgattctcacatcattcaatcacccgtccatatatttaacgggcggaaagataaaaaatgtatcaaagatgcggacggatggaaaaaatgggccgacaatcccgtatttcatgagttttcggacggccacatgttcatattaagtgaaactgaaaaagtggcggaacgaatctatgagattattaacaggagcactgcaggccaattgttataggatatgacagacagcattcgctgtctgttttttgtaacaaaatctgcccgcgagttttctcatttatcaaaaattttatgttatgatttgatggaatataattttgaagggattgtcgtacatgaatgatgcagcaaaagagctgaacagaacattatctgaagaaaacccgcacgtgcttcaaatgctttctgatttgggcagagagttgttttatccgaaaggggtgctgacacaatcggcggaagcgaaagccaaggccggaaagtataatgccacgatcgggattgccacctcacagggcgagtccatgcacttttctcatattcaagagacactgtccgcctataaccccgatgatatctacgattatgctccgccgcagggaaaagagccgctcagacaggaatggctgaaaaaaatgcgtctcgaaaatccttcattagccggcaaagacatcagcacgccgatcgtgacaaacgctttaacacacgggctgagcatcgccgccgacttgttcgtcaatgaaggggatacgctgcttctgcctgataaatattggggaaattacaatttcattttcggtgtccggcgcaaggcatccattgagacgtacccgctttttcagcaggatgggcgttttaatgcggcggggctgtccgagctgctgaaaaagcaggaagaaaaggcgattgtcgtgctgaatttcccgaataatccgacaggctacacgccgggagaagaggaagcggcagaaatcgtcagcgtgatcctggaagcggcggaggctggcaaagagattgtcgtgctcgtagacgatgcgtattacaatctgttttacgatgaaacggccattcaggaatccatcttcagcaaactcgcccaagtgcacgaccgggtgctttgcgtaaaaatagacggcgcgacgaaggaaaattacgcgtggggtttccgcgtcggttttattacgtacagcacaaaaagcgaaaaagcgctgcgcgtgcttgaggaaaaaacaaaagggattatcaggggaacgatttcaagcgccccgcacccgtcccaaacgtttatgctgcgggcgatgcagtcaccggaatacgagaaagaaaaatcgctgaagtataacatcatgaaaaaacgggctgacaaagtgaaagccgttcttgcagaaaacaagcactatgaagacgtatggacgccttatccgtttaactcgggttatttcatgtgtgtccggctgaaagacataaacgccggcgaattgagagtatcgttgcttgaaaagagaggaatcgggacgatatccattaatgaaaccgatttgcgaatcgcattttcatgtgttgaagaagaacacatcgcggatctgttcgaagaaatttatcaagaagcaaagcagctgcagaaacaggcggaaatatcaggctgataaaaaaggaggggggcaccctcctttttgtcttttattctgttacatttactttctcattcacattttcccggagcatttgcctgaaaacggcgatatctttttgcgaatagaaaagtcgtttcggcagcagaagtgttccgtaacccgatgtttgtaatcgaaacatatctttgtgctccctagccgagagcagttcatcccattcaaaaagaatgcttgcgtttttttgtttttggctgattccgagctgatgaatcgtaatacttctggcagatttcagccgctgattcgttttgtatgttctgtaaagacggaagaatgagattgccgttgcgatcaccgtgactgccaaagagagaatcacagctgcaaggaaattcaggagagctctgacgccccatgtgccgcctgtaaccgggccgttcattcaaaacagatggcagaagccagcagcataatcaaaaaacagacagccgcggattttccttgatgataagcaaagtgttttcttacatcggcaaatgttaagcagcccgcgagatagatattttcatttcgtgtgttgatcatattccgtctacgtttcctttcattttttccctatgtcgtaatatgctttttttcctccgtcctgaagcattgcttcccaagactccgatgacgatacagacggcgccggcgatatgataccagcggagtgactcatggagaacgaggacacccgcaagcatcgtcacgatgacggacaaattgttaaaggcgctcatcttaaacgcttcaatcttggacagcgcgtagtttgacatcaatgatgtaatgagagaagacaaaatgcctaaatacagaatcgctgcgataaaaccgggatcgcggaagggcagaaaatactgcccgatcgttccttccgctccgtgccggaagagagcgatgcagttgaaggaagcaaagccgatcgcagacatgcaccaggtcagctcacccaatgaaaaacgctgggtcgtgcgtctcgctgccgtattgtaaagggcggaggacagcgcggacaacaggatcaggaaagcacctttaaaactcgccgattccgcggacacccctttcattgtgaaaataaataccaccccggccactgacaggcatgtgaatcccttttgcgcccatgtcggacgttcctttaaaaagtaagacgaaaacagcatcgtaaaaatcgggatggcggcttgaatgataccggcttccgatgatgaagaatacaaaaggccgaacgcctgaaaactgaaaaacaaagccggatataaaagggccaaaggcaagatcgccagcacattcttccagctgacggacagtttgatccagccgaataaaacaggaagcattgcacagatgaaggccgctgtgaaccgatgagccaatatatcaaacggattggcggattgaagcgcaatcttgacaaatataaaggaaaaaccgataatcagcgcatttaaaatggcagcgaggtaagcagcagccaaacggttttgattaatcatctttacgaactcctttaatgagatcgagcgccggccgctcccttttattgtatgggaagggaagaagcagtacaatgagaataatgataaactgtaccggtacagatggaggttcagcatggaaaagtatatgaacgtgatgatagaagtggagagtctcattgaaggcggcacttttcaggaaggggcgcggctgccttctatcaggcagctggccgagcgttttcacgtcagtaaaagcaccgtcatccgtgcgcttcaggagcttgaaaaacggcacattatttatgccgtgccgaaaagcggctactatcttattaaaaatgacaaaaagcaggagcgagaacaaacaggtatcattgattttgcagcctcggcgccggaccctgatatttttccgtaccgcgactttcagcattgcatcaacaaagccattgatatgtataaaaatgatttgttcatttacggcacgccgcaggggcttccgtctttaatccgggtgcttcagacgctgttatccgattatcaggtatttgcaaaaaagcggaacatttttatcacctcgggtgtgcagcaggcgttatccctgctgtctctgatgccgtttccgaacggaaaaaagaagattttaatcgaacagccgggctatcatctgatggtggagcagcttgaagcgctgcgccttcccgcctgcggcattaaacggacggctgaggggcttgatatggcggaagtcgagcggctgtttcagacggaggaaattaagtttttttacacgatgccccgatttcataatccgctcggcagctctctgacagaatggcaaaaacgagagcttgtccgattagcggaggcgtatgacgtttatttggttgaggatgatttcctaggagatttagaggacaatcagaaggcagacccgctgtacgcctacgatctgtcttcccgcgtgatttatttgaaaagcttttcgaaaatgatttttccggggctgcgtgttggagcggctgtgctcccggattcgctggccccggttttccatacgtataaaaagctgagcgatatcgactgttcgatgatatcccaagcggcccttgaagtgtatatcaaaagcggcatgttcaaaaggcataaagaaaaaatccgggcctcttacagagcacgttccgagctgctccaaaacgcgctgcaggagtacgacggtttttctgtaaagcaaacgtcgatccatacccatctcgtgctggagaaaagcctttccgcttcaagagttgtgcagcgtctgaaagcgcaaggcgtgctggtggagccgattgacagccattacctatcggattttccgaaagaaaatatcatcaaactcaacgtgtccaacgtcaagacaggggatatcacgcgaggcatcaaaatgctgacggattgcttataacagctcttcatacgttttcatctcaatcccgtcacaaaaatcgggatgcgccgcacaaacggccagcttatactcctcgtccgcatcatatgtgcggatgaaacaaggttcatgcccgtccggaagctcaatggacacatggccgtcgtctttgaggcggacgctgaatgaatcaagcggcagggaaagcccttttccggcctgtttgataaagctttctttcatcgaccacaggtggtaaaaataatcggtctgctgatcggggtgtttcgcttgcagatcactgtattccgtcggcgaaaaaaaccgtttggcgatatcaatcgtgccgggcttcattttttcaatatcaatgccgatcggttttgaatcaacggcgcacacgatccagcgaccggagtgggaaatgttaaagtgcatgtccggaagcgcggggatgtacggctttccgtattcctgaacgctgaatgaaatcccggccggatcaagtccgtaagccttcgccgcagcggtgcggatcagcatgtcgccgatcaaggtgcggtgagcatcctccttatggtaaaagcgccggcatttttcccgcttttcggcggacacggccgccatcatccgatcctcttcccctgcagaaagcgggcggtccatatatactccgtaaatattcatgtccagatcctccgtctgaaaatattgtcaaaaccatcctatcatatcagacgaaagctgtccgaaaagaaaaaaacaaaaccgtttcggctttgtttttaatgaacggacgttgcccgcccggagatcgcgtatgttaacagtttagaggactgcggcaaagaaaaacgcagaatcagccccgtcaaaacagccgtaataatggttccggcgccgatcggtccgcccatcatccaggctgcggcaagaatcgtcagctcaatgccgttccgcacccattgcacgttccagcccgttttttcagatatcagcatcatcagagagtcccgggggcccgcgccgagccctgctgatacgtaaataccgacgccgcagccgatcagcagcaatccgatagaaaaacacacggccgctaaggaaaaagcgtgcgtctcaggaagcagaaacgaaaagaaatcaataaacattcccatcagcaccatgtttaagatagcgccgattttcgggagtgtcctcgtgaacaggcaggttaaagccacaatgaccgcgccgaccacgatggaccattggccgacagaaagcccgaaatgctgaaaaagcccataatgaaaggcatcccaagggctgatgccgagagcttttcctttaatggttaacgataccccgaaagacaaaatcaacagaccggcaaaataaaacgtccagcgcatcaagaattcccgcttcaaagaggtcccttctttcataaaatttcattaattgtcattgtagcataaccgccaaaaaaaagaagaagcgaaatcagtgtttcgcttcttctcccgctcctacaaaggattcagtatacgatttaaaaaccgctgcgtgcgttcttctttcggcgcggagaaaatttgctccggcggtccttgttccacaatgacgccgccgtcaatgaagatgacttcatcggccacttcctgcgcgaatttgatttcatgggtgacgacgaccatcgtccagccttcgttcgccagatccttaatcactttgagcacctcgccgaccagctccggatcaagcgctgacgtcggttcgtcaaacagcatcagctcgggctgaatcgcaagcgcgcgggcgatgccgacacgctgctgctgaccgccggaaagctggaacggatataaatccattttgtctttcagtccgactttttccagaagctccatcgcttcttttctgacttgctccttgtcgcgcttttgcacttgaacgggtccttccatgacgttttcaagcgccgtgcggtgaggaaacagatgatacgcctgaaagaccatgcctgatttgcggcggaggcgaagaatatcagcctgcttcacttttttggagaaatctattgaaaaatcggagaatgccagctcgccgcgattggggatctcaagcgcgttcagacagcgcagaagcgtcgtttttcctgaaccggacggtcccagaacggcgatgactttccctttttctatctccatatctatcttttttaaaatttcattctgtccgaatgatttatttaatcctttgacggaaagcatatcgaaacctccttatttggccacataacggtcgagacgccgttcgatcacgtgctgtacgattgacagcaagaagcagatgatccaataaataaaggcggcttcaatatagatgaccaagatttgatcaaggttttgcgcgccgatttcctgcgcttttctgaacagctccgcgacgagaatctgtgacgcgagagatgtatccttgatcaggctgataaatgtatttgataatggcggaatggacacgcgaaacgcctgcggcaggatcacgcggaacaatgtcttgcgataggtcatgccgatcgtataaccggcttcccattgccctttcggcacggatgaaatagatgcccggatgatttcagaagcgtaggcgcccacgtttaacgaaaacgcgatgactgcgcttgggaaagggtccagcgtaatattaaatgtcgggaacagataaaaaatgatgaacaattgaacgagaagaggagtgccgcgcaccgctgatacgtatacgctgaacacccatctcaatggtttcatatttgacattctggcgagcgccgtaatcagcgcgatgatcattccgaaaataaaggaaagaatggtaaggggaatcgagtaatagattcccccggaaagaatcggccagaatgactgctgcaccagatcccaaggaatggctgttgcaatcacgggttccggcatgttacttagaaacatcttcgccgaaccattttttcgctattttagaaagagtcccgtcctctttcatttcttttaacgctttgttgacgtgagtcacaagttcgccgcttccttttcggaatgcgaaatacgtctgctgcggctggcctgcttcaaacgcgattttcacgtttttattgccggacgtttttaagtagttcagtacggcaagcttatcgttgtaagtcagatcagcgcggccctgctgaatgagctgaagggattgcgccatgccttcaacgccttcaattttcgcgccggcttctttcgctaatttattgtaattgcttgttaatgactgagccgctgtttttcctttgacatcagcctctttcgcaatcgtgctgtcttttttcgtcacgacgactgcatttgacgttgtgtatttatccgaaaaatcatattggttctcacggcctgttttgccgacttggttggcaacgacgtcaaaccgtttcgcgtttaatccggcaaacatgctgtcccattgcgtttctttgaagtcagctttcagaccgaggcgtttcgcgacttcttgaatcacttcaacatcatatccggtcagtttgtcagtctttttatcatggaaggtaaacggttcgtacgttccttctgtgccgacggtcagtacgccttttttcttgacagaagcccaaagatcgccgtcttttgacttagatccgctgtcctgtgagtttccgcaggctgcaagcattgcgatgctgaccatcatgaacaaagcgaataatgcttttttcatcttctttattccccacttttctgagtagttttattgagaaaaaatagctcccaattgtaaaggataacttttttttagtatgagtcaagtaattggttttcataagcgggaattcttcgtgttccggatcaaaataatgccaaaaactgtctgaccggcttcggcagatagctgtcttttctccagatgacggccggtgtcatgacaaacgggttgtcttcgatgataaccgttttgacatgcgaacgcatatggacgggaatcatcgtcaaaggcagaattgtggcgccgaaccctgatgatacgaggctcaagagcgtcgcggagtcatggcattcacagacaacctgaaggtcgagaccgtactgttcacaaacttggaggacttggtcatacacacctcttccattgacggtccgcaaaaggatcaaaggcaaagaggcgatgtcattcagtttaatcgtttcaccgcacagtcgttttgaatgctcggacagcaccaatacacacggaatgtcttcaagctccttcgattcaatgccgtcgtttttaatcaaggtggtggtgacggcggcgtcaatctgccgggtttccagaagctcgagcagtgagacgggctcatcttcccaaatgttaaaagtgagatgcggaaaccgctctttcatctgtgacactttctcaagcatgagcgcggcgcagtaaatggttgacccgacggcaagtgtcccggccacctcctccttcagctcttgtacctcgattatagcgtcctcaaacttatgaagaatctctttcgctcttttcaaaaagacatttccttcatatgtaagggtcatttgtttctttttattgcggtcaaacagaatgacgcccaattcttcttcgagctgtttcagctgtctgcttaaaggcggctgtgccatatgaagctttttggcggccgtcgtgatcttctgctcttgggcaatggtgatgaaataacgcaattgccggatatccatgagaacgcgctcctttctgttatacctttaaggtatgatacatagatttaacgaatatttttcatatggatatatcaggagtatgatggttttgacaccacatttcaagcgtaaaggaggggtcaatatgaagcttgtcatcggaatgaccggggcaacaggagccatattcgggatcaggcttttagaatatttaaaagccgcggagatcgaaacccatcttgtcgtgtctccttgggcaaatgtcaccattacacatgaaaccgattatacgttaaaagatgtcgagaaactcgcatcctatacgtattcacacaaagaccaagcggcggcgatttcaagcggctcgtttgaaacggacgggatgatcatcgctccgtgcagcatgaaatcactggcaagcatccgcaccggaatggctgacaacctgctgacaagggcggctgacgtcatcttgaaggagcggaaaaaacttgtgctgctgacaagagaaacgccgctcagccaaattcatttagaaaatatgctagcgcttacaaaaatgggttccgtcattcttccgccgatgccggcattttataacaagccggctgacatggatgaattgatcgaccatattgtgttccggacgctcgatcagttcggcattcgtctgccggaagcgaaacggtggtacggaattgaaaaacaaaaaggaggaatctgataatggcctatcaggattttagggagtttctcgccgctcttgaaaaagaagggcagctcttaacagtcaacgaagaggtgaaaccggagccggatctgggcgccgctgcgcgtgcagccagcaatctcggggataaaacccctgcgcttttgtttaacaatatttacggacatcaccatgcgcaggtggctctgaatgtcatcggctcgtggccgaatcacgcgatgatgctcggcatgccgaaagatacgcctgttaaagaacaattctttgagttcgccaaacggtacgatgcatttccggtgccggtcaaacgggaagaaaccgcgccgtttcatgaaaatgaaataacggaagatatcaatctatttgacatccttccgctattcagaatcaaccagggggacggcggctactatttggataaagcgtgtgtcatttcccgcgatcttgaagatccggacaatttcggcaagcagaatgtcggcatttacagaatgcaggtaaagggaaaagaccgcctcggcattcagcccgtgcctcagcatgatattgcgattcatcttcgccaagctgaagaacgcggcgtgaatcttcccgttacgatcgcgctcggctgtgagccggtgattacgacagctgcgtcaactccgctgttatacgatcaatccgagtatgaaatggccggcgcgattcaaggggagccctacagaatcgtcaaatctaaactgtctgatttagacatcccttggggcactgaagtcgttctggaaggagagatccttgcgggagaacgggaatacgaaggacctttcggtgagttcacgggccattattcaggcggccgcagcatgccggtgatcaaaatcaaacgggtatatcatagaaacaatccgatttttgaacatttatacttaggcatgccgtggacggagtgcgattatatgattggcattaatacgtgcgtgccgctttaccagcagctcaaggaagcttatccgaacgaaattgtcgccgtgaacgcgatgtatacgcacggcctgatcgccattatttccacgaaaacgcgctacggcggatttgccaaggcggtcggcatgcgcgccctgacgacgccgcacggactcggctactgcaaaatggtcattgttgtggatgaggatgtcgatccgtttaacctgccgcaagtcatgtgggcgctctcaacgaaaatgcatccaaaacacgatgcagtcatcattcctgacctgtccgtccttccgcttgacccggggtctgatccggcagggatgacacacaaaatgattcttgacgccacgacgcctgtcgcgccggaaacaagaggccattattctcagccgcttgattctccgctgacaacgaaagaatgggaacaaaaactgatggacttaatgaatcaataagaaaggatgaggttgcaatgaaaacttgcccgcgctgtgaatcgaaaaaaggagaaaccgtcagccaatcgccggtcaaaggcgcttgggaaatttaccaatgccaaacctgctttttcacatggagatcctgtgaaccggaaagcatcacgaatccggcggcattcaacccggcatttaaaattgatccgaaagaaacggagacggccgcacatgttcccgctgttccggaaagaaaagcgtaatgatgacggagcacttgccggaggcgctttacacgcttttagacgggacggagcttgaaaaaaagcagcacgacgcatttgtgctccaatccgtgacaaaagaaggccgcccgcacgcggccatgatcagcgccggtgaaatcgtggccgtgagcagaacaaatctccggatcgccttatggaaaaacacgacgaccgtaagaagccttctgcattcgggacaagctcttttcatcgcctggcacggaggagccgcatattacgtcacattggaatgtgaggcgcttccgccgctgaaagaggcgaaacacgagcgggaacggttcagctgccgcgtgatcaccgtcaaggaagatcgggcgaaatacgcggatctgacatccggaccggccatccagctccacgaaccggaagatgtcttgaagagatggagagaaacgcttgaggagttaaaacaatagacgcatcaaaaaagcctgcggacgattccgcaggcttttctttatctgttattgtacgcctttcatcgcccgtttaatgacgggagacagaagaatcaaaataataccgagaatgatcgaaacaagaccgattgagccgaagtaggccgcttcagaaatcttatcaaacaaaccgactacttttgcgttcagggcttgaccgcaggcgtttgttaaaaaccacatgctcatcgtctgcgctgagaaagcggcaggcgcaagttttgttgtgacggataaaccgaccggtgaaaggcaaagctcaccaagcacaaccaaaaggaagctgagcacaagccaaagcgggctcacaagctcaccgctcccgcccataaccggaagcaccatgactaaaaatgataatccggcaaggataatgccgatggcgaatttaatcggtgttgaaggctggcgtttgccaagcttcatccagatccaggcgaacaccggcgcgaaaataacgatgaataacgggttcagagactggaaccatgaagactcaagatgcatgcccgcaaaggaaagtctcgtgcgctgatccgcatataaagcaagaatcgtcgcgccctgctcctgaatcgcccagaacattgccgctgcaacaaacagcggaacataagccgcaagccgtgatttttccgttttcgtcgcttttttgctcgtgaacatcacgataaagtaaataaccggaatgacaatgccgaggatactgacggtatcaatcacacgctggatcgtcagccagccggtttgaatcagaacgatgataactgctgctgcgatgaccactccgattcccgtgccgatcactgatgatttagaaatcggattcggtacattggagcctgctttgccgaggtatttctttctcgtaagagcgaaaacaatcagtccgaggaacataccggccgcggcgcatccgaagcctaagtggtagttgtacttctgtccgagtgttccgacaattagcggcgcaagcaatccgccgaggttgatccccatgtaaaagatgctgaaacctgagtcgcggcgctcgtcttccttcgtatataaatctccgacaacgctggatacgtttggtttaagcaggccggttccgataataatcagagccatgctggtaaaaaacgccgccgtgctgccagggaaggcaagagcgatgtgcccgaacataattaaaattccgccgtaaaatacggtgtttgccgtgccgaatacccggtcggccagccatccgccgatgacgctcgacatgtatacgagagacccgtatatggacatgatggcaactgcggtcgttttatcaaagccgagaccgccatgagcgacttccgtgtataaatagtaaagcaatatggctctcataccatagtaggagaaacgctcccaaaattcggtgaaaaacagtgtaaacaagccgcggggatgaccgaaaaagcctcgttgcggcacagtttctgttatagagtccttatcaatagatgccacctgagccaaccctttcttaaaaaagtgtattacaaaaatcatattcttatataatacttgtgtcaatataatttatactgaattcaaaaaattccagaatgaaaagatattaaaacgttgaatatagacgaattttcctaattccaatgacttattttgttatattatctgactaaactatctttataaacttttttaataaaatttaaagtatgtacaggcggagcgggatatggcggaataagatgacaataagagaggaaggaggagattatcacttgccgaatcgtatattggatattacggattgcggtgtggcggcagacggaaaaaccgatgtgacgggcgccatcaaccaatgcttggccaaggccgtcagcgaaggctgtcatacggtgttttttccgccgggaacctataaaatcaacggcacgcttggcggggacagcagccagccgtttcggaacgccgggattaacgtgccgagccatctcaccatcgttttagatccggaatgcacgattaaagtggcgccgaacagctcctggggctactcggctttctatataggcaggcgggaaaatgtcaccatcaccggcggccggatcatcggcgaacgggatgaacacacgtataccaatgtccctttgcgttcgacccatgaatgggggtttggaatctgtattgaaggcagcagcaatgtgctgatcgaaaatgtgaagatttcggattttacgggagacggcattattgtcagcccgctcgggttaaaaacaaacagtgattacgaaacttcagaacaggtgaccatccgccgctgtgagatcaggcagtcaaggcgaaacaacatttcaatcaccggctgcaataccgttacggtggaagaatgcgtgattgaagacgccgggcaagggaacggaacggctccgaaattcggaatcgatattgaatcgtacggagaaggcgatattgattatgaagaagctcttcatattacggtccgcaacaacttcttttccggaaacgccgcaagctcagtcaccaattttaacggatatcatgtgttaattgaaggaaatcattccgataacacaatcagctacgggtatggggcacataccgtcatttcggggaatgtcttctttcggtcagacggcggctcaaggaccgcagtcgccggacaaggtgtgtcacaaggacaggacagcagcaatgccgtcatttccaacaatctgattaccggtttttccaccggaatagatgtaaggggaaaaagcgtcctcgtcacccataacaaaatcagtcaatttgaaaatacgggcatttccgtctatcaggcagaagatgtgaccgttgacggcaatgtcattgaaaacggacgttccgaaacgagacgaagcactgggatgcgggcgacgctgtcggaaaacgccgtctttatgaataatactctgaatcaggtaacggacggaatcagcatgtcggccggcaatatcaccgtaaaacaaaatgtgctgacatcgttcagccggggcatatgggtcacaggcggaaatgccgttattgaaggaaatacgctgattccgaatgcgtatcagggcgccgcggagtcctatgccgtatctgtgacaaatgacgccagggctgtcatcaagggaaatctcttcaaaagctacaaaaactatcccattttcagttcaacatcctcgggaacctctgtcatcagcaaccgctttgaatcatcaccgcttatcgttaccgtgtatctgaattcaggcacgcatgaagtcatagacaatacgctcacgatcaaccgaacggcgggcagcccgatcggcatctatctgaacggagcctcaaattccctcgtgtcgggcaataccatcaacaacctttccgccgcttctgcttccgccatacaaaccaattcttccgcaagtactaaaatcatcggcaaccgcattatcaaaggcgtcattgtgaaacacgcgacagatacggacagcggaaatatcgtcatctgaaaacaatctgcatcggaaaaataaaaagaacacatgaactccgaaagaaggagggatgtgttcttttttgaaacaatacagccgtgcgcctgtcaggcatcttttttacctgatttatataaaacgatcatttctctgattaaaaagagggcgaataaaaacagcatcagccattctgagaaggtggtcaatttaaaagcggacaggttgttttggaccgctccatagaaactgaaaccttgcagcatatctatcgttactgaaatgatcagacaggcagccagcaaaaaaaatgaaacccccaatattttcatgcgcatcactctccctttttatccttttcgattacgcagaacttatacagactttccgccgtgcataatcttttgccgtacaggaagaatatgaaaaaaacgaggaaaggttttttgcgatatgccgccattttttaagcagaagaaacaaaaaaaagccgatcaaaacgaccgtgacaatgaaggcagaaaagaagcggacagccagccggacaaagagcgggatgagccgatctccctcagcttaaagcaaaatatgaagaagctgtctgagaggttcggcaacagtgccgatgtcgtcatccgccggcttaaaatcggaaaagaagagcttccggccgcaattgtgtatatcgccggtttggtagacgaacagctcgtcagccaatcccttctggaggatttaatcgacatcccgtccgttcagccggaacaagcggtctgcctgatatacgataaaacgcttgcgatcggcggggtgaaagaggcagaaaaatggaaaagtctttatgccgggctggtggcgggcagcacgctcatttttgtcgacggggctgacaaggcgctgatcgccagcacggaagggggagagcaccggtccattcaagagccgagcactcaggtctctttccgcggcccgcggcagggattcactgaatctctgcaaaccaatatttccatgatccgcaggtatgtaaaaacgcctgatgtatgggttgaaaaaatggagatcggacacgaaacgaatacggatgtcgcgctgatgtatattaacggaatttgcgataaaaagctgattaaggaagtccgcaagcggctgaagcacattgacatcgacagcattctggaatccggctacattgaacagctcattgaagacgcgccgttttctgtgtttcccaccgtatatcatacggagcggccggacgttgtggcggggaatctgctggaaggacgatttgcgattatcgtggacggaacgccgttcgttctcatcgcgccggccttatttattcaattttttcaatctgttgaggattattattcacgatttgatatcgccacaagcatcagggtgctgcgggttttgattttcttcatttcactggtggcgccggggatttatgtggcggcgacgacctttcaccaggaaatgattccgacgcagctgctgattgtcatcgcggctcagcgggagacggtgccgttcccggccgtgattgaagcgctgacgatggaagtggcctttgagattctcagggaggcgggtgtccggcttccgagagttgtcggctccgccgtttccatagtcggagcgcttgtcatcggccaggccgccgtacaggccggcattgtttccccagccatggttatcgtcgtcgccctgacggcgattgccagctttgcgaccccggcttttgacatggcgatatctgcgcggctgatccggtttctttttattctgtcggcggcggtcatgggattttacgggctgattctgggcattatcatgatgtttgtccatctgtgcggcctgcgttcattcggatttccgtatatgtccccgctcgctcctttaaccccgggcgggctgaaggattcccttcttcgagctccgttatgggcggatgaaaaaaggccgggactgctcgtgcaggaaaacaacaggcgccaaggggaacatcaaagaccgaaaccggagacatccagaggaatggttaataaagatgtagaagagggcgacggtaatgaaaagacgtaaatggatgcttatcctttgtacgatggtttcccttatgtttgtatccggatgctgggataaaagggagctgaccgatctagcggtgatctccgccatcggtattgaccggaccgaaacgggaaaatacgtccttcacttgcaaattatcaatccgggaaacgtggccggcggtctgcagggcggcggagcgggagaccggcctccggtttccgtctattcggtgtccggagacaatatgacggaagctttgagaaaaggctcgatgaaagtgtccagaaggctctattttgcgcatacgaatctcgtggtgttcagtgaaaaactggcgaaagaggaagggctcagttttattctggacaatcttgaccgcgacaccgaattcaggacgaccgcaaccgttgtgatcgcgcataattgcaaggctgaagacattattaaagtgctgacgccgattgataaaatcccttccaataaagtgaacaagacgctcagcttcacgcaggaacaatacggcagagtcattaaaaccaaccttcaggacgttctgattgatctcgcttctccgaccgggtcgccgtttattccgggttatgaaatgcacggagacgataaagccggtcctacgatggaaaatacgcagacaactgaaccgaaagcagtgctgtcagcggacggactggcggtgttcaaaaaggatgggaggctggattactggattgaggatgacgacagtgtgggggctgtatggctgctcaataggatcaagcatacgttcatcaatgcggattggaagaacgtgaagcatgcaatcagtctgcaggtcacccgccagaatacaaaggtgacggccacttttccgaacggaaaaccgcatattcacgtgcatgctcaggtcgaggggctggtggacgctgtcagataccctttccatctgtctgatccgcaagtgctgatgacgatgcaaaaggcgctcagcgtgcagcttgagaaagatatcaccaaatcgattgaagatataaaagcccataagaatgacttcgtcggcttcggagacctgatctatcggaagcatccggacaaatggaaaaagttcaaaaggaagtgggatgaagaatatttccccaatctccccgtagatgtcaaaacggaagtcattatcagaagaacgggcttgcggaataatcctctctcagacaagcttgagcatgattgatttgaggagaaaggagcgaagcgtatggaaaatgcgaaaatcggcacgcgtcagctgtttattatgatcattttgtttgaattgggcagttcgttattgatcccgccgggcacgatggccgggcgggatgcgtggctgtccgtgcttctcgggtgcgttatcggtctcggacttttctacgtttatcaggcgctgtatcaattttttcctgagtcttctccgagagattacatgaacgaactgatcggcagacatctgagctgggcggtctcccttctttatattctctattttgcttatatcgccgcccgcgtattgcgggattttggcgaaatgcttgtcaccttcgcctaccaggacacgccgcttttaattgtgaatgccatgctgatgatcgccgcaatatttgcggtcagaaagggaattgaagtgatagcgagagccggcgagctgctgtttggcattatgtatttcctgacagccgtcgggctgatcctcattatcagctcaggcacgataaacctcagatttctccagcccgttttagcggagggtgcaggaacggtcatttattccgtgtttaaacagacgatgttcatcccgttcggtgaattaatcgtgtttgtcatgattttcccttatttaaaagatcggaaaaaggtgaagaaaaccggatttctggcgattatcatcagcgggctgtttttggcaatgtcagtggcgattaatatttgtgtgctggacgtcaacttaatgctccgctctcaatttccgctgctgagcaccatacagacaattaaagtggaagagtttttagaccggctggatgtctttttcatgctcgtgctcgtcatcggcggttttttcaaagtcagcctttttacatatgcggttgtcgtgggcgtgtccacgctgtttaaagaaaaaaatccgtcccagctggccttcccggtcggattaggggtgctgattctctccatcagcatcgcaagcaatttttcggaacacatgaatgaaggcttaaacattgtgccgatctatattcatcttccgtttcaagtgctgttccccgttttgctgcttatcattgccgttattaagaaaaagctcaaagggaccgtctatacagtttcgaagaaataacccggccggtgcgccgggttttttaaaaaatcatgatttttgtcttaatgcattgacaaacttgcctgacaattgtacattttgatttattcttataaaattactaggaaatataggtttagtggtgttaatatgttccgaaaccgtatttcagaatagaaggagatccatcatgacaaagaaaaaagaaatcaaactaggtgtgtttctcgcgggcaccggccatcatgtcgcttcttggagacatcctcaggcaccggcggacgcgagcatgaatttggattatttcaaagaactggcgaaaacagcggagcgggggaaattggacatgctgttcttggcggacagtttatcaatagacggcaaatcacatccgaatgtgctgacgcgctttgagccgtttacgctgctgtcggcgctcgctcaggtcacatcccgcatcggtctgacggcgaccgcgtctaccacatacagcgaaccgttccatatcgcgagacaatttgcatcgcttgaccatctttccaacggccgcgcgggctggaatgtcgtcacatcttcgattgaatcgaccgcgcttaatttcagcggcgaaaagcatcttgagcaccatctcagatatcagcgcgcggaagaattcgttgaagtcgtcaaaggattatgggattcgtgggaggaagacgcctttatccgtgacaaagaatcaggagcatttttcgataaagacaaaatgcatgaattgaaccataaaggaacatatttctccgtgagagggccgttaaatgtcgcccgcacacctcaagggcgcccggtcattattcaggccggatcatcaggagacggaaaagcgctggccgccaaaacggcggaggtcattttcaccgcgcaaaatcatttggagtccgcgcaggaattctatcaatctattaaagaacaagcggcttctttcggccgtgatcctgaaaaaatcgcgatcatgccgggaatttttcccgttatcgccgataccgaagaagaagcgcaggcaaaatatgaagagctccaagacctcatcattccgtctgtcggcctgaacattctgcaaaactatctgggcggcgtcgatctttccgcctgcccgcttgacggcccgctgcctgaattggatgcggatgcgtcgaatgccgttaaaagccgcttcaagctcgttcaggagatggccaaacgcgataacatgaccatccgcgagctgtacaaatatgtggcgggttcaagaggccatcatatctttgtcggaacgccagaacagcttgccgataagatggaagaatgggtcggaaaacaagcttgtgacggtttcaacatcatgccgccgcttttgcctgaaggtctcactctttttgtagacaaagtgattccgattttacaagaacggggcgtgttcagaaaagagtatgaaggaacgacgctgagagaacatttcggactggaaaaaccggcaaaccgatatgccgactgaaggagggcttatcatgtcaagacaataccggctcgcaacggaggcagacgctgatgagctgctttcactgacactgcgggcgtatgaaccgatccgcaagctcggcatcaactttgccgctgccacggcggataaagaactcgttttgaataacatacaaaaaaacgcctgttacgttttggaggaagacggccggattctggcgacgatttctctgcggatgccgtgggggccgaatcccgggccgtacggtgttcctcatatttggtggtttgccgtcgatcctgaaaccggaaaaaaagggacgggctcagacatgctggagtggctggagaatacagtgctccgcgacacattaaaagcgcctttcgtgtcactgggcacagcggataagcatccgtggctgatcggcatgtacgagcggaaaggctacgtccgtgcaggcgaaaaggatctaggaaaagggcacatcaccatctatttaaaaaaacaattgcaggattaacatattaataggaaaaggcgggattttaatgaagaagaaaacatgggctttgctgctgtctgccgcgcttttggcggtcttatcagcatgcggaaacggaaaagaaagcgaaggcggcgataacgtactgcatgtcggcgccacgggacaaagctatccgttcgcatataaagaaaatggcaagctgaccggctttgacgtggatgtcatggaagccgtcgcgaaaaaaatcaacatgaaactggactggaagctgcttgaattcagcggactgatgggagagctccagaccggcaaactcgacaccatctctaaccaggtcgctgtcacggacgaacgcgagaaaacgtataacttcacagaaccgtattcgtatgcgggcactcaaatcgtcgtcaaaaacgataacaaagacatcaaatcagtcaacgatctaaaaggaaaaacagtggcggccgttctgggctcaaaccacgcgaaaaaccttgagagcaaggacccggataaaaaaatcaacatgaaaacatatgaaacacaagaaggcacgctgaaagacgtggcttacggacgggttgacgcttatgtaaacagccgcagcgtcctgatcgcccagatcaaaaagaccggtctgcctctgaaattagcaggagacccgattgtctatgaaaaagtcgctttcccgtttgcgaaagatgcggctcacgataaaatccgcaaaaaagtaaacaaagccattgaagacctgcgaaaagacggcacgctgaaaaagctgtctgaaaagtactttaaagaagatatcacaacagaagcaaagcattaagaaacggcggtgaaaatcgagaatgaacagcattgattggggatttatgttttcagcttttcccgcgttaatcgaagccttgccgatcacattactaatggccgtcgcggccatggtatttgccgtgatcggcggccttatattagcgcttatcacaaaaaatcgtgttcctgtgcttcaccagctgtcaaaggtgtatatttcatttttccggggcgtgccgacgctcgtccagcttttcttaatttattacggcctgcctcagctgtttcccggaatgagcaagatgacggcgttaaccgcggcgattatcgggttaagcctgaagaatgccgcctacttggctgaaatcttccgcgcggcgctcaactcagtcgatgaggggcagcttgaagcctgtctgtctgtcggaatgacaaaatcccaggcgtacagacgaatcattttcccgcaagccgtcagaaacgcgcttcccgcgacgggaaatacgtttatcggcctgttaaaagaaacatcgctcgcctttacattaggagtgatggaaatgttcgcccaaggaaaaatgtacgcatcaggcaacctcaaatattttgagacgtatttagccgtcgcggtcatgtactggattcttacgattatttacagtgtgctgcaggatctgctcgaacgggcgatcagcaagccttatcgcacataggaggaggctcaggatgatacaagtcagacatattcgaaaagcatttaaagaccttaccgtacttgacgggatcgatcttgagatcaaaagcggcgaagtcacggccatcatcggcccgtcaggctcgggaaaatcaacgctcctccgttgtttgaatctgctggagcgcccggatgacggcatcattgaaatcggtgatgcaaagctgaatgcagcgtcctattcgcgcaaagacgttcataagcttcgccagcagacggcgatggtgtttcagaattacaacctgttcaaaaacaaaaccgccctgcaaaatgtgacagaggcgctgatcaccgcgcaaaagaaaccgaaaaaagaagcggaacagatcggtatggatctgctgcggcaagtcggtttagaacacaaagcggacagctacccgattacgatgtcaggcggacagcagcagcggatcgggattgcgcgcgccttggccgttgatcctcacgcgattttactggatgaaccgacttcggcccttgaccctgagcttgtagccggggtgctccaagtcatcaaatcaattgccgaaaaacagacaaccatgatcatcgtcacgcatgagatggcttttgcgcgtgaagtggccgacaaagttatttttatggcggacggacgcatcatcgaacagggaacgccggaagagctgtttgacaatccgcagaacgaacggacgaaaaaatttattaagcaagtgggagagcccgccgaacttgtctaagaagggaagaagaagaaatggcaaatgaaacgtatgaatcattaaacaaacgtttaatcaatatccgccgcgaccttcatgaacaccctgagctgtcaggcgaggaatacgaaacgacgaataaaatccgccgctggctggaggaagaaggaattacggttcttgatatgccgaaacttcaaaccggagtgatcgctgaaatcaaaggagacaaaagcggccccgtcatcgccgtcagagcggacatcgacgcattgccgatcgaagagaaaacaaaccttccgtttgcttcgcgcaacagcggcgtgatgcacgcctgcggccatgatttccatacggcatctatcctcggcacggcttttttattaaatgagagaaagcatgagctgaaaggaacggtgcggtttatttttcagcccgcggaagaaatcgccgccggagcaagacaggtcattgaagccggcgcgcttgacggtgtatcggcgatattcggcatgcataacaaacctgacctccccgtcggcacggtcggtctgaaagaaggcccgctgatggcgagtgtcgaccgctttgaaatcactgttaaaggaaaaggcggccacgccggaatccctgataacagcattgatccgattcaggcggcagggcagattatcggcggcctgcaatcggttgtcagcagaaatatcagctcgctttataatgccgtcgtcagcatcacaagagttcaaggcggcagctcttggaatgtcatcccggaccatgttgaaatggaaggcaccgtccggacgtttcaaaaagaagcgcgtgacgctgttccgaaacatatgaagcgggttgccgaaggaatcgcagccggattcggggcagaggctgatttccgctggtatccttaccttccgtcagtgatgaacgacgcccgtttcatacaggcggcggaacaaacggctgaaagcctcgggcttcagaccgttcgggcagaacagtcgcccggcggtgaagactttgcattatatcaagaaaaaatccccggcttcttcgtctggatgggaacaaacggaacagaagaatggcaccatcccgccttcacactcgacgaaaaagcgctcccggcagcggctgagtttttcgcccggcttgccgtcaatgtattggagcagacggaatgaatacggaaaatctgacggccggacttgctcaggccgtcatgtcgtctgtgccggaaacatccgctgaagcgatgaaagaagcgcgcaaaggactgcttgattttacagcggcagcttttgcggggagacgggataaaggagttgaaaagctggtaaaactggccgaagaagaaggcggggtgccgatagcgccgcttatcggcagaaatcaaaaaaccacgccgtcccaatccgcgctcattaacggattcatcgcacatgcgcttgattttgacgacgttcattctgatgtaagaggacatccgagcgcagtcatccttccggctttgattgcagccgcatcagccggccgtatagacaaaagccgttttctcggtgcttatgtgacgggaattgaagtgatggcgcggctcggcgagtcagctggaaggcatcattacgagaaaggctggcacaatacaggaacgttaggtgccattgcggccgcatgcgccgtcggattcgcggagaatctgaatcaaacccaattgcagaaagcaatcgggtttgcggctgcccgttccggaggcatgagagtgcaattcgggacagaaatgaagccgctccacgccggactggccgctcaagccggattgttcgccgtgcagcttgccaaggccggtttcggcggctcagttcatgcgctcgacggggagaaaggttttttcggactgtacggcgatcttgaacgggcagaaaccctgcttgtaaacgggtggggaacaccttggcggattgtgagcccgggactttggtttaaggtttatccgttttgctcggcggctcatcatgcggcggacgccattctcaagctgaaggccgaacatggtctcactttcggccaaacggaacggatcgacgtgatttatccgccgggcggtgacgctgcattgacagaacggcgtccgaaaacaggcgaagcgggaagattcagcgtggaatatgtgatcaccttagctttgcacggtaaggatttttcagttgaacatttcacatccgagccgattccggaatcccttcaaaaaggatttgagcggattcaccgcagctgcgatgatcaaattcagccggctgacaacgccgttccgaagggccgttttacaattgtacgggtcacggcttccagcggtcatgtttatgaaacacgtatcgactgtccgaagggagcgccgggaaacggtctttctgaaaaagacattgaagacaaactccggctcgctttaccgggagaagagaaaaaggcggaagaattgatcaaagcagccggacaatcaaatatggaccgttatttacagctgatataaataaaaagagcggggggatgcagccctcgctctttttacgttcacttctattgaatagggggatatagggtgcgcccctgtctgcgctggcaggggcgcggtatcaggaaacggccgtgccgttttctttaaccgtgaaacttcctcttgataagcggatgttgatatccgaaactttggcaatttgttcgtcgtgcgtaaccatgatgacgcatttgccgtctttatgcgccagatcctgaaagagccggacgatttcctttgacgtatcctcgtcgagatttcccgtcggctcgtccgcgcaaatcaaatccgtgttacagcagaaagcccgcgcaattgaaacgcgctgctgctgtccgccgcttaatgtcagcacccgctgacgggcctgctgttcggtgatgccgacttttttcagcatgctgagcgcgaacgcatctttgttgttctccttagagtcggtgatctccatcgccgttgtgacattctggagcgccgtcatatacgggatcagatgataagattgaaagacgatagagacatattgatttctgaatttggttaatccgattttggagatgtcttttccgttataaaggatgcttccctctttaggtgtgtcaaggccgcccgccagagacagaaacgttgttttccccgttccggaggcgccgacaattgtataaaacttccctttttcaaagctgattgttatatcctgaaacagcggctgtgatttctcttggtaccagtagccggtctgttgaaaggttaataggctcattatgctgcctcctcttactcctgcttggtcaggatcgttttagggtgaagccgcatgactgatacagacggcagtaatgtggcgatgacggcaattgcgacgccgatcccgccaagaatcagaaggtcattcagtgagacgtttacctgcattgtactgatgacatccgcgccggatgaatgctgaccgaacaagccgcctccccgcggcatttctccgccgccccagccgcttgtttgctgctgtgaatcattggctgagctgacctgctgggaaagaagctgatttccgagctgattcgccacaaggctgcccgtgacggatgcgatcccgatggcaataacggcgacaaccagaatttccgttaagaattgtccgatgagcttccagcgcttttcgccgatcgccatcaagacacccatttcatacttgcgttccctgatcgacatcatcacgatcaacccgagaatgaccgcgcccgcgatggatacaaggtataccacgtttttagaaaatgacgcgacattttcaatcgggccggccatttgctgatacacctgatcatttgtcgtcagcgtgtaggttttatcaactatggatgtttttttcgcagccgcaacgaatgagtcaatatatttggcatcatccatataataaacggctgagctgattttgtttttgtaatcagacccttttaacgccgccgcggcggtgtaaggcgtatagattttattgtcaggatttaagaatgaaaaatgctgtgcctgatcgtctcctgatgatgttgttttatagattcccacaattttaagcttcgttttcacagaatcatccgctgctgaggatacggtaatggagccgccgaccttcagcttgttttgatctgccagcgtttcattaatcacggcgacttttgcgtccgcatctgtctttgtgatggcgcgtccgtcagtgatttttgagctcccgcctgtgaaatcatcaagcaatgccgtagagagcacgccttcgatcgaaatatccgctgaaattatctgtcttccgccgccttgaaaacggccgtcgccggaactgttatcggctgattcgcctgagctttttatcgcatcaaagctttctgcatttgctgacgctgtcgtgaggaagttgtaatttttaacatgctgtaaagatgtaagcttcttggcatctgagacggaaatcggcgttgattcaaacgtcctcttttcaccgtctttttgctgctgcgccatttgcttttggcggtcagcctggagtgtgacgctcccgccgagctgctgccttgccagttcgcttgatttctttgctgctgactggatcgtaagaccggacaggacaaaaatgcaaatcactgaaaacacaaccagctgcaaaaatgtttttcccttttttgccttcatgctccaaaaggctctttttataaagttcatgtctgttcctccgtgtgggtgtcagatcttgtaaaaccggccttctttagcaccggccatccgatatgtatatagtaggagaaatgtatgaaaaaaatatgaacaaactatttccggatgatgaaataaaaactaacaattgtgaaacccgaaaacacccgggtaaaatggtgctattataagaaaaagcgtgaagataagcggaggaaccaatgaagatattaatgatagaagacaatataagcgtatgcaccatgacggaaatgttcttttttaaagaaggatttgaagccgaatttgtccatgacggagtggaaggctatcagcgtttcacggaagaggactgggatttggtcattctggacattatgcttccatcaatggacggagtgacgatctgccggaaaataagagagacgagcagtgtgccgattattatgctgaccgcaaaggacacggagtctgatcaggtgatcgggtttgaaatgggagccgacgactatgtcaccaagccgttcagcccgctgacactagtagcgcggattaaagcggtgatcagaagataccgggcgacggggcaggccgttaaaagcgacgacttgatcgaaacggcgtgtttttcaatcaataagaagacgcgggaagtgtttctgcacggaaaacctgtcgagaatctgacgccgaaggaattcgatctgctcttttatctcgcacaaaacccgcgccaggttttttcgagagagcagctgcttgagcaggtgtggggctatcaattttacggcgatgaacgtacggttgatgttcatattaaacggctgcgcaaaaaactgtccagtgaggaaaaaccgtttttatacacggtgtggggggtaggatacaaatttgatgaggattaaatacttatatcagctgctgttaagtcatgtcagcattttgattttggcctttttcatcatcatttccctgttttcgcactttgtgaaagattttgcgtatcaaaataaagtggatgagctgtcttcttacgcgcagcagatcacaagtgagctgaacggccgcgatcttgatctgcgccgcctgtatccgtatcaggacatgttaaaaacgcgcgagaccaggtttattatttttgatgaacatcagcggccttacttttttcctgacgatatgccgccgcgcgagaagctgaaaagtaaagagtggcacatgctgaagcaagggaaaaccgttcagatcagagcggagatgaaccgttttaatacagaaggtttagaagtatcgcttgtcgcaaaaccgctttttatcaacgatcaatttaaaggcgcggtgctgctcgtgtctcccgtcagaggggtcgagcagatgatcagccaggtcaaccgctatatgatttacgcgatcatcagcacccttatcatcacgattctgctgagctggcttttatctaaatttcacgtcaagcggattcagacattgcgggatgcgaccggaaaagtggcatccggtgattacgatatttcgctcaagaacagcggcggcgatgaaatcggcatgctggcgtccgatttcaacatcatggccaaaaatctgaagcaatcgagagagcagattgaccgccttgaaaaacggaggcgccaatttatcgccgatgtctcccatgagctgagaacgcctttgacgaccattaacggacttgtggaggggcttaacagcaacaccatcccggaaaaagataaagagaaatgcttctcgctgatcagcgaagaaacgaagcggatgctcaggctcgtgaaagaaaacctggattatgaaaaaatcagatcccagcaaatcaaactggacaagctcagtctgccgctcatcgaggtgtttgaaattattaaagagcatctcaatcagcaggcggaggaaaaacaaaatcagctgcggattcaagtggaggacggcgtcaaagtgttcgccgattatgacaggctgatccagattctcgtcaacatcacgaaaaacagcattcaatttacgcaaaagggagacatcacgctgcgcgggtatgaaggctataaagaaacggtgattgaaatcgaagacaccgggatcggcatctccaaagaggaaattgaacatatatgggagcggttttataaggcggacgtgtcccggacgaatacggcatacggcgaatacggactcggcctttccatcgtcaggcagctcgtcgaaatgcacaagggtacgatagatattgacagcgaaaaaggaaaaggcacgacctttacaatccgccttccgctgaatacgaaaaatgaatcatcttgaaaccggcggtcccgtctggccgccgtctgttttatctccgctcggaaaattgcgctctgccgaaacaaagtttgcgtgtttttcgggatggaaagagacggaaacgtgataaaataactggtaaacaggtcttggatggggagggtgaaggaatgaagagcgggttaattccttcttcagcagtcgggcagaaaattaacgagtggtatcgatacatcagaacattcagcgtgccggatgcggagatcttgaaggccgagatcaaacaagagcttgaccatatggagcctgattcgaacttagtgctttattattccctcatggaatttcgccatcagctgatgctggattacttggagccgctggaaaaactgaagatagaagaccagccgaccctgtcggaaattcttgataacattgataacagccaggccggcctcaaagggcttctcgattattacgtcaactttttcaaaggcatgtttgaatttgataaaagagaatttatctcagcgattacatattataaacaagctgagaaaaaactggccttcgtatcggaccacgtggaacgggcggagttttattttaaagtggccgaagcttattatcatatgaaacaaacgtatttttctttgatacatataaaaaacgcttatgaaatttacgtagagcaggacacatataacgtccggatcattcaatgccattttgtattcggcgtcaatttaatggatgaaaggcgctttgaacaggcggccaaacattttcagcacgctctgcaaatggccgaaaaagaacaaaaagcgcagcttgtcgggagggcgctgtataacctcggactgtgctactacaatcaggaccgcatcggcgaagcgattccgtactttgaacgggcggtcgatacatttgaatcacaaagaatcgtcaattctcttcctcaagcatattttctaatcacactcatttactttaaactcggaaaaaaagaaaaagcgtcggaatatcacaagcggggatatgaatatgctaaagaaacagacgatcccgtttacacggtaaaattcgaatggctgcaggctctgtatcaggcgaaaccggatgaggaaacaatcagcgcgtgtttccgttacctggaagataaaaatttatacgccgatatagaggatttagcactagaagcagctaaatattactatgaacaaaattgctttaaaatttcttctgactattttctgaaagtcgaagaggcaaggaaacaaatacaaaggagtgagggtttgtatgaaattgaaatctaaatggtttgttatttgtttagcagccgccgcgatttttacagtgacaggtgcaggccagacagatcaggctgacttccatgtagctgaaagaggaatgacgtgagaagaaaatagcctgaacaaaggaaaagactgcatgggaatgttcccggcagtctttttttgcgcggccggactcggacagcggcggaaaacaaaagaaaacgccgcaggtcaaaacccgcagcgtcctcatatagacggagtgatgcttagaagccgccaacataggcagtacctacaataaccaacaggataaataaaacaacgatcaaagcgaaagagctgattccagaatatcctgacatgagcttcacctccatattgtctataccatacaatatgtaaaagaagctgctttgtaagggatattagtggacaagagaaaaaagaggcggtgtcctatgagagtaagactccggcgaaaaattcgtcatacagtgcccgcaccgcgtgtttttcctgttcttctttcactccgaacatcatgctgacttccgatgacccttgattgatcatctcgatgttgacgccggcttccgacagtgctttggatgccctggcggttgtgccgacattatggcgcatcgcttccccgacgaccataatcagcgccagattgtgcctgactgtgacttcatctgcttgaagttcctgcttcagacgggtgacgagcctgtgttccagttctgagtccatctgattgtgccgaaggatgatcgtgatgtcgtcaatgccggatggaacgtgttcatacgtcaatccttcttcctccaaaatgtgaagggctttgcggccgaaaccgatttcccggttcattaaatatttgcttatgtaaatgctgcaaaagcccgtgtcgcttgcgatgccgatgactggcccgttcgtattgtcacggctgctgacgacgcgtgttcctttcgcatccggattattcgtattcttaatttgaacggggatgccggcccgaaatgcgggaatcagcgcttcatcatgaaaaacggaaaatccggcataggagagctcacgcatttcccgatacgtcagttcgttaatttctttcggatgccgcacgattgacgggttgacggaatagacggcgtccacatcagtaaagttttcgtacaggtcggcttttaagccgctggcgagaatggagccggtaatatcagaaccgctccgggaaaacgtcacaatctcatgctccttcgtgtaaccgaaaaatcccggaaaaatgatcaagccttcacggtttcttagacggtacaaatgaccataagactcagggagcacctgcgcgcttccgggttcattcgtcacaaacagccccgcttctttcggacttacgtattccgctttcacgccctgccgtcggaagtaggctgcgatcagcttcgcgttgttgtcctcgccgctcgccttcaccgcatccatatattgttcgggattggttttacagctgtttaaaagagcgaataggtcactgcggattctttctataatagagaaatccaggttcagctcacgcgcgatggcggcgtaccgttcaatgaccgtttcggcaagctcgggcgctgcacctttttgcaaataatgctccgcacagcggattaacagatccgtcacctttgtatcgtccgagaagcgttttcccggtgccgatacgacgacggctttccgcgcgggatcagccgtcacgatttgaaacactttctcaagctgggctcctgacgcaagagagctgcctccgaattttacaactttcatgatttacatcccctaatatttaaattttctcacaaatttaatttttattatctctctttcaaacatgtaaatcaaggattttttctacttgggaagaacatttgtattttcgtggaggaattttgccgctgtttgtcagatttgtttccctcaagcgtgtcatcatgtgcaaaaaatgataagcagccaaatgtaggttatagaaaatcctgcaaattcttgatagactgattgtaagacaatttagtgtacggcccgcggatgaccgcttttgaaagcaaaactgtattgactgcgcttggaaagatgataagattataattgtcgttgataatgataatcattacgagtgggatatatgggagttgtttggcaatcagtcataccgtttgtgatgggtgcagggaggcagcatgaagctacgttacttacttttgctactggcggttttggcgtgtacttctatatttatcggtgtagaagatttgtcgccgctggatatttttcatttaaataaagaacaggcgggtacattgtttgacagccggctgccgcgtttggtgagcattatcatcgccggcatgagcctgagcatctgcggattaatcatgcagcagatcagccggaataaatttgtatcgccgacgactgcgggaacgatggattgggcaaggctcggaatcttgatttcattaatgctttttacgtcagcgagtccgcttgtgaaaatgtctatcgctttcgttttcgcgttggcgggaaatttccttttcatgaaaatcctcgagagaatcaagttcaatgatgcgatttttattcctctcgtcggtttaatgcttgggaacatcgtcagctcaatcgccacgtttatcgcatataaatatgacctgatccaaaacctgtcgtcttggctgcagggagatttctcactggtcgtcaaaggccggtatgagcttttatatctgagtatcccgcttttgatcatcgcttatgtgtatgcggataaatttacggtggcgggaatgggagagagcttttccgtcaatctcggcctgaaatacaaacgcgtcgtcaatatcggtctgattatcgtgtcgctcatcgcttcactggtgatcctgaccgtcgggatgctgccgtttctcggtttgatcattcccaatatggtgtcgatttacaaaggggacaacctgaggagcagcctgcctcacaccgctctgctgggcgctgtttttgtgctgttttgcgacattttgggaagggtgatcatcttcccgtacgaaatttccatcggcctgatggtcggtgttatcggcagcggcatcttcctgtatatgctgttaaggagaaaagcatatgagtcataataaaaaaattacgctgctggcggcgctcgccatgatatgtatcggattcttcctgttctacggactgggcaattgggaatactccctgccgagacgatgcttcaaagtgcttgccatgatgctcaccggaggagcgatcgcgttttcgacggtcatcttccagacgattacaaataaccgcatactgacaccgggcattttaggcctcgattccctgtatatgctcattcagaccgtcatcgtgttcctgttcggttcaatgaatatcgtcatgatgaacaaaaatcttaatttcgtcatctccgtcgggctgatggtgctcttgtcactcgttttgtatcagctcatgtttaaaggcgaggggcggaacgtgtttttccttctgcttgtcggcgtcgtgttcggcacgctgttcaacagtctgtcatcctttatgcagatgctgattgatccgaatgagttccaggttgttcaggacaaaatgtttgccagctttaacaatatcaacaccgatcttttatggtttgccggtgctgtctttcttctgacgggcatttatgtctggcggttcacgcggttttttgatgtgctgtcgctcggcagggagcacgccgtcaacctggggattgattacgataagcttgtgaaacagatgctcattgtcgtcgccattcttgtgtctgtctctacggctcttgtcgggccgattatgtttttaggactgcttgtcgtcaatctggcgagagagtttttaaaaacctacaggcacacgtatttaatcgcgggttctgtcctgatcagcatcgtcgcgctcgtcgggggccagttcgtcgtggagaaagtgttcacgttttccacgacgctgagcgtcatcattaattttgccggcgggatttattttatctatctgctgttaaaggagaataaatcatggtagaggtcaaaaatgtaagcaaacaatacggagggaaaaccgtccttgagaaaacgtctctatccattcaaaagggcaggctcacctcatttatcggtccgaacggcgcgggaaaaagcacgctgctgtctatcatgagccggctgattaagacggattccggggaaattacggtcgacgggcaagagatcggggcctgcaaaagcaacgatctggcaaaaaaaatcagcatcctgaagcagacgaaccaaatcaatatcaggctgacgattaaagacctggtcagcttcggcagatttccgtattcccaggggaaactgacggatgaagattgggtgcatatcaaccaggccctcagttatatgaagctggatgaattaaaggataaatacctcgatcagctcagcggaggccagtgccagagggcgtttatcgcgatgatcatcgctcaggatacggactatatttttctcgatgagccgctgaacaatttagatatgaagcattccgttgaaatgatgaagctgttgaagcggcttgtggaagacttcggaaaaacggtcgtcgtagtgattcacgatatcaacttcgcatccgtatattcagaccatatcgtcgcactgaaaaacggccggatcgtcaaagaagggcctgcggaggagatcattgaaacctccgtgcttgaagatatttatgatatgaccatcccgattcaagagattgacagtcagcggatcggtgtgtacttttcttaaaaaccagatgaggtgaaagtcatgaaaaaattcgcattgctaatcattgcactcgttacgatttttgttgtttctgcatgcggaaacggggacaaaacatcaggcaaatcaaaagaaacaatcacaatcaaagatgacctgaacaaagaaggcgtcaaagtgccgaagaatccgaaaaaagtcgtcgtattcaacttcggaatgctggatacgatggatgaactcggtttacaggatcacgtggcgggacttccgaaacaaaaccttccaaaatacttatcttcatataaaagtgataaatacgccaataccggcggtttaaaagaaccggattttgaaaaagtcgcggatattgatccggatttaatcattatcgcccacagacaatctgattcttttaaagagttctcaaaaatcgcgcccacgatttatcttgatgatgactatacaaactacgttgacagattcaagcacaacaccgaagtgattggcaaaatcttcaacaaagaaaatgaagtgaaagataagcttgcgaaaattgacaaatccattgcggatctgaagaaaaagacaagcagcacggataaaaacgggttagtggtgatggcgaacgacggcaaaatcagcgcgttcggatctaaatcaagatacggcttcattcatgatgtgttcggcgtcaaaccggctgacaaaaacatcgaagcctcattgcacggacaaagcatttcctatgaatatatcgccaaaacaaaccctgattacatgtttgtcgttgaccgcggaacagcgatcggcacaaaatcttcaacaaaacaagtggttgaaaatgattatgtaaaatcggtgaaagccgtgaaaaacaaccatgttgtctaccttgattcagctacatggtatttatcaggaggcggcctggaatccatggcgcaaatggtgaaagaagtaaaagacggaatcgagaagtaaaaaaagaacccggtcacatacgtgatcgggttctttttggtttaccgcgtaacggcctgctgctgctcgggctgacgcggttttttcttcaatataaaagataggaggaagccggccagcgcgatgcaggcggctacgacaaatgccgcattcatgccgtgcagggcggcgtttgccggagttgtcgcatttgcgtgcgcggcctggctgctcatcacggaaactagcagcgccgtaccgatagaaccgccgacttggcggacggtattgttcatggctgtgccgtgcggaattaagtggcgcggcagggcgttgattcccgctgtcgtcaccggcatcataatcatggctgttcccaaaagccgcgcggtataaacgacgacaatccaaatgagagacgtcgagtccgtcagattcataaacggcagggacgtgagcaggatgatgaagaatccggtcatcgcaaggccctttccgccgattttgtcaaacacccggccgataaacggagacatcatccccatcacaatcgcgcccggcaaaagcattaatccggtatcaaacgcggatacgccccggactttttgcgtgtaaagcgggagaatagtttccgttccgatcagcagcgcgaaaacaagcgttccgagcagggtggtcaggctgaaaatcccgaaagaaaacacgcggaattccagcatcggttttttgagcttcatctgtcttgcgataaagaaaatcagcgcgaccgctccgacaagcagcgaagtcagcacttcagcactggtccaccctgatgaaccggcgcttgagaagccgtaaagcagaccgccgaatccgagggtcgataagaccacggataaaatatcaatctgtgtttctcgtaatgtcgtgacgtttttcatcagaataatcgctaaaagcaaatcgatgactgcgatcgggaagatgatataaaacaaagaccgccaagagaatgcttcgaccgcccatccggaaagcgtcgggccgatcgccggcgcgaacgaaataactaagccgaccatacccatggcgcggccgcgcttttccatcgggaaaatcgtgagaaataccgtctgcatgagcggcagcataattccggcaccggccgcctggataatccgggccgtcaagagcaccggaaagttcggtgcgaatgcgccgacaatggtgcccgccgtgaaaatactcatggcggaaatcaagagggtgcggcttgtgaatttctctattaaaaacgcggtaatcggaatcaaaatcccgttcgtcagcataaacgatgttgtcagccattgcgctttgttggcgtctatattgaagtcattcataatgtgcggcagcgccgtgataagcagtgtctggttcaaaatggcgacgaacgctcccgccaaaagaatcccgacaatgacagagcggttgtatggtgcagttttaatactcttattcaagctgattccttctttctttatagtttgagcaatgttttaatggctgcaagcggctggtgcagcggtccggcctgctccaaataaccgatgagcgctttgatgagaaaatcccgcggctgtttgtccgctgattctttctccagcatagccgccgcggaagcgagtcctgcggcgtcatatttttcctccggaagggctgagacggcttctttcagttccttcaggctttcagccagcaatacggttttgtctttcggctcaaatgaggtagcggaggcgatataaaggtcaatcatctcctgaggcaaagcggtctcggttgtcctgttttcgacgatgagattgaggtggcggatgataaactccgtgagcggctccagggcgagcggttctttttccagcttaatcagcgtgatgcattctctcaggagcccctgcaggacgatcaccagctcccatacataaggaataatgtcttcgccgtacgtctgaatcagtgaatcgcgatgccagcagataaaggtggagcgggccctgtgaatatgccgttttacccgctcattaatggaagaggggcttccgtacatcagcatattaaaaaactgctgattgcgcctgaagccttcaagctcagccatcagttttttggcaaaccgttcctcaggggagaggcttgtttcttcattcaataatgaagcggcggctaccatctgtttctggttaaagtcgagcagctccaacagcaggtcttcctttgattcaaacagcttatataaagatgctttggagactttgcactcctctgcgatcgcctgcatcgaaaccgacgaaaagcttttcccggaaaaaagctttcttgccgccagcagaatatccgttttcttatcattcataagcccagattccttctttcgtcacaatagaaaacccatcggttcacagaaaaccaatgagtatatgatgaaaatattaacaaaaatttttacacagtgtcaacgcttttgtttgagaaacagaaaaaacctgccggagtgttccggcaggctgatccgcttatttatccgtcttaaacccttgtttttcaagcatttcacgaatgtgaggataataaagctgcttatagtaggaggtgatgccttgtgaccagtttctcgtttcctgtccgtcggtgcgttttttcatgtattcggacatctgcttgtcataggcctcgatatgtgttcttaaatcttcttcttgatacgtttcatgatgcagaacggctgcttgcggcagacgcggttttttcgcggagcggtctgccggatggccgatgacgagaccggaaaccgggaaaacgtatttcgggagtttcagcaattcaatgagttcgtccggcttgccgcgcacggcgccgatcggcacagtgccgagtcccattgattcagccgcagccgttgccgtacccagcgcaatcccgacatctacggctccgactaagacggactctaaaccgttcgtgatctcaagcggtgtatcattatactcttcaagcgcaattttggcacggttaaaatcagcgcagaataaaaggaaaaccggcgcttggtcaatccacggctggccgcccgccaattcggatatttttttcttccgttccttatctttcaccgcaataacggtaaattgctggccgttaatggaagtcggcgctgcctgagcggcttggatgataaggtccagctgttcatccgatacgggttcatctgtgtagctgcggatggaacggtggtctgttaataattgaaggacttcgttcatgtcattcatcctttcgttactctgacagttctgtgcggacgacgtcaagcggcgcactcagcacttcttttgcttttgccacgaatccttggaaatggtcagttgcgttgtggaatttcatcgcttcttcatctttccattgttcaagcatgacgaatgtattttcctcaccgactttttcgaaaaggtcgtattgcacatttccttcttccgcgcgtgaatgctgaacaagtgattgcgcttctcctaaaaattcctcgcgtttatccgcttttactttcatgtaagcctgtaagacgatcatggttattcctcctgattgggttaatttgttatagttcgaatattatcgaactaactgtaacatgtttcgctgcgaatggtaaaggaaaaaccctcaccgcctaaattgtcacccgccgatgatctgtgttacatttgactcatgaacattccaaaccatcctgaaaccgaacgcttacagctgacaaaggttcttcatgctctgagtgatccgctccgcttagagctggtcaaacaattggcggaaacaacagaaaaaacgtgcggaacctgcgctgatgtccgggtcgctaaatcaacgctgtcccatcacttcaaagtgctgcgggaagcggggatcgcccaggtgcgcatagacgggaagcaccgctattattccctgcgcaaagatgatttacaagcggcgtttcccggcctgctggaggcgattttgcagacagagccggaccgctggtaaataagtccccgaattccgggggtttttttatgcgccgaaaaccgcccggtaaagcctgtagacgccttcttgaatatcgctctccttcaggcgggcgaaccccaggataagctgcggtttgtttgaatcgcctcccgctctcagacggaaccggctcatcgcaaacagatcgagctgttctgcatccgcccgtgccaatatctctttttctgaacgggcgcagtcaaactcagtgacaaaatgaagccccgcattggcgccctttacactgattctttcaccgaatgtttcttccaaagccgaaatgaggcgttcccgcatgttcttataatgctgcttcatctttttaatatgtttctgatattcacctgattcgataaattctttcagcgcgagctgggcaagcgtgctgcacgtatgcaggtcatacgttctctctttgaaagtccgcaaaagcccgggcggcagaaccatatagctgatgcgcagacctgggaaaagggattttgaaaaggtccccatgtagatgacattttgaaaccggtcaaggctttgaagcgccggtatcgtatcggcgtcatatttaaattcactgtcataatcatcttcaatgatgaagcggccgttctgttcggcggcccagtttaaaagctgaatccgccgggaagccggcatgatcacgcctgaggggaattgatgggaaggcgtggtgatcaatacagagggccggcgtttttcgatttcgttcatggacatgcctttttcatcaaggctgatcgtcgccgtctttttcccgaggttttgcagcagccggtacatcctcatatatcccgggttctccatggcgtagagcgcgtcttttggcaacagttccgtcagcagctgcaccagcaattgcgtgcccgctccgagcacgatttgttccgggcggcatgtaacgccccttgtcagggaaataagccgcgaaattgtttcacggacttcatataaaccttgcggatggacgagttctccgagtgtatgaaatgaacgggcggctgctttctgctcacagcggaaccagcttttcagggggaaatgcgccgtatccacgctcatatgagaaaacgaaatccagccgcttttatccgtctcccgctctttcaaattatcaggcaatgagagcgaaggcgtttcttcatgataaaccgtatcaatttcctccacgaaaaagccttttctttcaaccgcatataaataaccttctgaaagcagctgctgataagctgaattcactgaattcacgctgaccttcagcgtctcggcaagctcccgtttagacggcacctttgtatgaggcatcaggctgcgcttcaaaacggccgcttttatgtgctgatagatctgctgatagatataatccgccgtttccgaatggtcaatggaaatcgtcagcatccagactctgcccctttctgataccatggataaattgattttggtacttttcatcataccaaaaagaagtcagaatgataagaaaacaatgcagggggatggaatctatgagtcgaacagcatcatcggaagtgacaactgcccagtggcagcaaaaacgggatcaattcgtttccaagggggtcggcaacggaaaccgcagcatggcggtaaaaggggaaggggcgcttttgtacgatttggacggcagacgattcattgattttgccggagcgatcggaacgctgaatgtcggccattcccatccgaaagtggtggaggccgtgaagaaacaggcggaggatctgattcacccgggatttaacgtcatgatgtatccgtcttatattgagctggccgaaaaactttgcgcccttgcgccgggagatcatgcgaaaaaagcgatttttctcaattcgggggcggaagcggtggaaaacgccgtgaaaatcgccagaaaatacacgaagcgccaggctgtcgtgtcatttacaagagggttccacggccgcacgaacatgacgatgagcatgacgagcaaggtgaagccttataaattcggtttcggcccgtttgcctcagaggtgtatcaggcgccgtttccttactattatcaaaagccggccggcatgagcgacgagcagtatgacgactttatcatcagcgcttttgaggatttctttatcgccgcagttgcaccggaaaccgtcgcctgtgtcgtcatggagccggttcagggagaaggcggcttcatcattccgtcaaaacgtttcgtccagcacgtcgccgctttttgtcaaaaacacggcatcgtttttgtggcggatgagattcagaccggttttgccagaacgggaacgtattttgcgattgagcatttcggagccgttccggatttgatcaccgtatccaaatcacttgcggccggattgccgctgagcggcgtcatcggccgggcggaaatgcttgatgccgccgcgccgggggaactcgggggcacatatgcgggaagcccgctcggctgtgcggctgcgcttgcggtcttggatattattgaagaagaagggctgaatcagcgttccgaggagatcggccggatcatcgagcatcaagcgctcgagtggaaaaaagagcatgcctgtatcggagaagtgcgcagactcggcgcgatggcggccatcgaaattgtcaaagatccggacacgcgggaaccggacaaagcaaaagccgcggcgatcgccaaaacggcgaacgagaacggactgctgctgctgacggccggcattaacggcaacattatcagattcctgacgccgcttgtcgtgacggatgagcagctcaaagaaggcctttccattatcgaagcagctctgtgagttcaattattggaatgccggcggatgtgtctgctatcatgaaagtgtgagatacatcaaccagcattcaatggctttactatagcagagaaaggaatgttcaatatgccagaacaattaacagtgtacaacccggcaacgggagaggcgatcgaaagcatcccccagcagacggccgaagatgttgaaaaagcgattgaacgttcacatcaagcgtttcaatcatggtccaaaacatcagcgggagaacgtgcctcacttttgagaaaatggtatgagctgattgttgaaaataaagaagaacttgcggaattaattacgaaagaaaacggcaaaccgtacgaagaagcggtcggagaagttttatacggcgccggctatattgaatggttcgccgaagaagcaaaacggatttacggcagaacagtacctgcgccgacaacgggcaaacggattgtcgtcacccgtcaggcggtcggcccggtagccgcgatcacgccgtggaatttcccgaatgcgatgattacaagaaaagccgcgcccgctttggcggcaggctgtacgttcatcatcaaaccggcggaggatacgccgctttccgcttacgcccttgcgcgtctcgcatatgaagcgggaattccgaaggacgtgctgcaagtggtaatcggtgacggagccgaaatcggaaacgtcttcaccagcagcccgaaaatccgcaaaattacctttaccggctcaacgcctgtcggcaaaatcctgatgaaaaacagcgccgacaccgtaaaacatatgtcaatggagcttggcggacatgcgccgctgatcgtggatgaagacgctgatcttgatctggcagtagcccaaacaatggcctctaaattcagaaatgccggccaaacctgcgtctgtgcgaaccggctgatcgtacacgaatccgtaaaagacgagtttgcgaaaaaactgagtgaagaagctgcgaaactcaaagtcggaaacggtcttgaaaaaggcgtaaacgtcggccctgtcatcaacaaaaaaggcttcgataaaatcgtcggccaaattaatgacgccgtggaaaaaggcgcaaaagtgctcacgggcggaacgtatgaccaaaacgatgaaaaaggatgctatttcgtgacaccgaccgtgctgtcaaatgtagatacatccatgaacatcatgcatgaagaaacattcggcccggttgcgccgatcgttacgttctcagatattgatgaagcgatcaagcttgcgaacgatacgccgttcgggcttgcggcttatttcttcacagaaaactaccgccgcggcatctatatttctgaacagcttgaatacggcatcatcggctggaatgacggcggtccgtccgcggttcaagcgccgttcggaggaatgaaagaaagcggcatcggccgtgaaggcggtacggaaggcattgagccgtacctggaaaccaaatacatgtctatcggactttaatgagccgaaaagaaagccccgcttctaagcggggctgtttttattgagcagtctgccggtgaatatcgccggcaggcttttttgatctagcgggaataatcggttcgattccagacaaaataacagcaaatacgattgaaagaaggtcgccatcatggatatattactggctcttctcccggctttattttgggggagcatcgtgttatttaacgtcaaattaggcggcgggccttacagccagacgctgggaacgacaatcggggcgctcatcgtttcgtttgtgttgtatctgtttgtccacccggtgctgtctgggcgcatttttattgtcggcatcatctcggggctgttttggtcgctcggccaaagcaatcagcttaaaagcatacagctgatgggcgtttcaaaaacgatgccgatatcaacgggaatgcagctcgtctcgacttctttgttcggtgtgatcgtattcaaagaatggtcaaccccgatcgcgattacgctgggtattctcgcccttatttttatcatcatcgggattgtgctcacatctttagaagataaaaaggggcgggcggacggagaaccgggaaacttaaaaaaaggcattgtcatcctgctgatctccacgctcggttatttggtctatgtcgttgtggcccggctgttcggcgtatccggatggtcagcgctcctgccgcaggcgatcgggatggtcatcggcggactgctcctgacgtacaagcataaaccgtttaataagtacgccctcaagaacattctgccgggaatcatctgggcgctcgggaatatgtttctgttcatctcacagccgcgcgttggagttgcgacaagtttttccctctctcaaatggggatcgtcatcagcacgctcggcggaatctttattctccgtgagagcaaaacgaagcgtcagctggtcgccattgccatcgggattatcctgatcattgtggccgcggtattcttaggcgttgcgaaatcaaattcataacaaatgcaggaggtttgaacatgtacacggatttaaaaggaaaagtcgttgccattacgggagcttcatcaggattaggaaaagcgatggcgatccgcttcggacaggagcaggcgaaagtcgtggttaactactatagtaatgaaaaagacgcccaaaccgttaaagaagagattcaaaaagcgggaggcgaagcggtcatcgttcaaggagacgtcacaaaagaagaagatgtcaaaaacatcgtgcagaccgcggtgaaggaattcgggacattggatgtcatgatcaataacgccggcatggaaaatccggttcagtcacatgaaatgccgcttaaagactggaacaaagtcatcaataccaatctgaccggcgctttcttaggaagccgcgaagccattaaatattacgtagagaatgatattcaaggaaacgtcattaacatgtcaagcgtacatgaaatgattccatggcctctgtttgttcactacgcggcgagtaaaggcggcatcaaattgatgacggaaacgctggcgcttgagtacgcgccgaagcgcatccgtgtcaacaatatcggaccgggagccatcaatacgccgatcaacgcggaaaaatttgcggatcccgttcagaaaaaagatgtggaaagcatgattccgatgggatatatcggtgagccggaagaaatcgcggctgtcgccgtctggcttgcttcaaaggaatcaagctacgtaaccggcattacgctgtttgctgacgggggaatgaccaaatatccgtcattccaggcaggccgcggataagaaaaaaagcgatcgcaggctctttagagccggatcgctttttgcttacgcgcgttttttctttacaagcgccgcgatggaaaggataatcgccgcagctgacagaacgattgctgcaatatcaagcgctgatacgccggatttgctttcttcgtttgactgttcagctccgtgcgcatccgtcacgctggccgatttcgtgattttcgtaatcgagtgaggcgtgtcggctttctcatcacccgtccattctacaatgctgccgtctttgtaatattggtaagcgtcccaagcggcatctccgctcttttcaggatttttcgcaacgaacgtgaactgctggaattggccgggctggatgccgccgtcctttgcttcccaagtgacggagaccgctttgtcatcatgtttggatacggatgttttccagcccggaatcggctgatattgctgaaattcaacgccggcgggcactttcagcacgactttcgttgtcggctcattcttttccacaggcactttcatcgtgtacgtttcccaagaaccagcggcggattccgccggtttgactgagacgtgggcgcttgctgccgccgtaaaaccgacgagtgacagggtcacggcggatatgaataataaagccttttttttcaacatgagatacactccttagtttgtcgttgagaatatttggttgatttcattaaaatcgtttgtcagcccgtggactttgatcttccagtttcccttttcggtgatggacaggttggcggcttcgaatgtgccttccttcgtcttcttcaaatcaaaggtgctttcatgctgtttgccgctgaagcccgtctggtaaacagtgaccgtaaattgctgaatgtcttttaccaagctgccgttgtgatcggtgacaatgacttgaaattcatttttacccggctggttcggcgtaatgtgcaaggacagggtttccccgtttccgatcgtttctgagccgttaaaaggcaatggcgcaggcggcggcgggctgggcaggcttgtgaagacggcggttgtaaataataccgcgatgcctagtgcccattcagcctttatcgttgcgctgatgctcctttttctgctgaacttcgtcatccatacgtgaacagcgccgagcgcaagcatgatgacaaacagtccgattttcaaaaggagcgtcttaccgtaagcggtgtgaaagagtgaatcaaacgtgcggataatgaaaaatccgttcagcacacctgaaaataacagcacaccgacagaggcgaacgcccaaggagaaaaccgtctgaccgtttcccaagcgatggttttatcgggttttctccactctgatgaaagaagcagcacaagcgcggcgataccgcccatccatacagaagcggccgataaatggagaaagtccatcgcgatgccgaccgctttttcgtcgataaccgccgcatgcccggcgaatgcttttgccaaaagcgaagcgaagaagaacaacagcggcgccgtccagtacgcaaatgaccggaatgctttcttcttcaacagcgggatcatggacagggcgagcaggataaataagctgatctggatcatccagacgtacccgcctgccgttttcagaagcgtttcttttacatagtccggctggaacgcggcgctccaagcgccgcccgcgttttctttcgtctggatcgggagctggcagataagcgcgagtcccgttacacataaagaaatcacgagcagctttacagttcgttttgcttttgatgaatctttattatttctgtaccaaaacagatggaaaaaagccgtgccgataaacagggagagagcggtgtacaaaataccgcggtcgatggccgcttcgggatgaagcgccgcttgcgatgatgtctgctcctgaagttctccgccggcttgtccgatactgaaagggatgacgccggataccggatgtccgtcggccgataccgcgttccattccgctctgtaaatatcatgcggcaggttttttttcaatgccgcggtcatgatgcgggcatcatttttttgaatcaccgttttgcccgcatcgacccgttcgccggatgaattatagaccttaatggagtggaagccttcttcaatctgttcattaaactcaatttcaatctgcttcggcgcttgttttaattcgctgttctcacccggatttgagtttgtgatgtaggcgtgggcgaagcttgttttcggaatcaaaacaaggaacagcaaaaagatgagccagcgtttgttctgtctcatggatgatgacaccgccttccggttggttgttgttatgtcttgctgcaggtgcatcccttctgcctgtcgtgtaagatgatgtccgccgcctcgtcaaaggtgcaaatgaccccgccgaatcctttttgaaaccgttctgcgtaatcaagcgttgagaagggaatcgcctgaggccggcagcagtgaaggtcaatatcggcatgggctaaaaagtatgcggaagcggccgtcagcgtcgtctggagaagaaaatctttacaaatgacgtgggacacttcttcctttttatcctcataccgcaaaatcgcgcaatgaatgcagcacatctgctcaacggcttgtgaaacggtaataagctgaacagaatacgaatgctgaatcggccgcaggcaatagccgcattgattggcgcttcgttctgaaacgggagggagcgtaatgccgccgggtgtccggataatccggtttgcatccgccagctgattgacgtctctgtacacggtcatctcggagacgccgaatctctcgcttatgtcagagattttcagcgcgccctcttctttcagccattcaagcaaggtttgctgtctgtgaatcggaagcaattctgcatcctcctttttatgatgcgaatgagtgatgaacctccctctaagagtagatgttttcacaaatgcacacaagagcctgatgataaaatatgtgaaaaaatgttgaacaatcacaaatgtaaaagacgtagtcagactctgttataatagaagggttgaatggaggaataaacatgaaagaaacgacctgcccgaactgcggcaagccgattacaggcgacatggtcagatcatccatgatcccgtgccagtttcagtgcgggcattgccatgtgaaattgcgtgaatataaagtatcagctccgattatggctgcggccattgcgatcacggtgcttttgatttatcttgtgcagatggccagaaccgccgtcatgccgatgtttccggcagcgcggtatgtgccggccgccattttcgcgctcgtatgtgcgtatccggtgtttattatcagtgagcggctcattgccaaactcgtcgtcacaaaaggacacattatatacagaaagcggtaagacacctttgatgaggtgtcttttttttgttaaggagttgtcacagtctctgtgccaaactcctctttacttttcattgaatggggattgtaagcgttttatgatgaagacacaggggagagagagaaaccccgtgtcttatttattttcatctgaaggcaagcaaacagggagggaatgaacatgcagcaagaacagcaagctggcatgaaagtgaagatacagcggttcggcagttatttaagcggtatgatcatgccgaatatcggcgcatttatcgcatggggaattatcaccgcgctgtttatacctaaggggtggtttccgaatccgcagctgaatacattggtaagcccgatgattacgtatcttctgccgcttttaatcgcatatacgggcggaaaaatgatttacgatcaccgcgggggagtcgtcggagcgacggcggccatcggagtcattgtcggagcggacattccgatgttcttaggggcaatgattatggggcctttgggcggttatctcattaaacaattagaccgtgtgtttaaagataaagtcagacagggttttgaaatgctgatcaacaacttcacggcgggaattatcggagctgtgctcacgattatcgcgttttatgcgatcggcccggttgtcctgtctctaaacaaattgctggcggcgggtgtggaagtcattgtccacgcgaatttgctgccgattgcaagcgttttcgtagaaccggcgaaagtcctgttcctgaataacgcgatcaaccacggcattttaagtccgatcggaatcgagcaggccgccaaagcgggtaaatccattctgttcttagtggaagcgaaccccgggccgggactcggtattttactggcatatatgttctttgggaaaggctcttcaagatcgacggccccgggagcggcgatcattcatttcttcggggggattcatgaaatctatttcccttacattttaatgaaaccgatgctgatcctcgcggcgatcgccgggggagcgagcggactgcttacattctcgatctttaacgcgggtcttgtcgcggcatcatctccgggaagcatcatcgccattttggcgctgacgccgaaaggaagctacctcggcgtgctggcgggcgtcatcgttgccgcggccgtatcgtttatcgtctcggcgcttattctgaaatcgtctaaagcgggcgaagaagatttgacagccgcggcggaaaaaatgcaggaaatgaaaggcaggaaaagtgaagcggcggccgcgttggcagacaaagaggaagagccggaaaacagcgccgctgatatttccgccgaccaagtcagccgcattatcttcgcgtgtgacgcgggtatgggatcgagcgcaatgggcgcctccattttaagaaacaaagtgaaaaaagcagacctggatattgatgtgacaaatacgtcgatcaataatctgccgaatgacgcggatatcgtcattacgcataaggacctgactgaccgcgcgaaagcgaagctgccgcaggcggtgcacatttcggttgataatttcttgaacagcccgaaatacgatgaactgattgaaaagcttaaaaactaatcaaacagaaagagggattttcatcatggaagtattggctaaagcgaacatcaaactgaaccagacggtgaactcaaaggaggatgccatccgcctcgcgggacagacattgattgataacggctacgtgaagaacggctatgtggaaaaaatgttcgaacgtgaagaaacatcatccacgtttatggggaatttcatcgcgatcccgcacggcacggaagatgcaaaggatgaggtgcttcattcaggcatttccgtcatccagattccggacggtgtggaatacggtgaaggcaatacggcaaaggtcgttttcggtatcgccggaaaaaacaatgaacacttagacattctgtcaaacatcgccatcatctgctcagaggaagaaaacatcgaacggctgatcagtgcaaagacggaagaagaactggccgctattttcagcgaggtgaactgacatgattgcccttcatttcggagcgggaaacatcgggcggggctttatcggcgccctgctccatcattccggctatgaggtagttttcgctgatgtgaatgaaacgatggtcagccttctcaatgaaaagaaggaatataccgtggagcttgccgacggcggccggcagacagaaatcatcggccccgtttcagccatcaacagcgcggtgcaagaacaagagctgtacaggctgatcaatgaagcggcgatcattacgacggcggtgggcccgaacgttctcagactcatcgccccgtccatcgcggaagggctgaagcgcaaaacgtcctctgagcctctcaatatcattgcctgtgaaaatatgatcggcggcagcagttttctgaaaaaagaagttttcggacatttgacggaagcggagcgggaactcgtgaaccggacggtcggcttcccggattctgcggtggatcggatcgtgccgattcaccaccatgaagatccgctgaaagtatccgtagaaccgttttttgaatgggtcatagacagaaccggctttgccggcggccagccggtactggaaggcgcgttgtttacggatgatcttacgcctttcatcgagagaaagctgtttaccgtcaataccggtcatgccgttacggcgtacgtcggctatcagcgcggattaaaaaccgtcaaagaggccatcggccatccggaaatccggcgtgtcgtgtacgatgcactttcagaaacgggcgagtacttagtgaaagcgtacggctttaagcaatccgaacacgagcagtacatgaaaaaaatcatcggccgctttgaaaatgaatacatcacggatgatgtgacgagggtcgccagatcaccgctcagaaaactcggagcgaatgacagattagtagggccggccaaaaaaataaaagaaccgaacgcgctggcagaaggcatcgccgccgccctgcgctttgactatcaggatgatccggaagcggttgagctgcaaaagcttatcgcggaaaaaggcacgagccgcgttcttcaagacatttgcggtattcagccgcatgaaccgctgcacggcatcgtgctcaaaaagctcaatcaataaaaatgaacccgcgtcgggggacgcgggttttttcttgcgttataatgagagggaagggaggctgcgtgatgaatcagaagctattgccccatcgttttccgtttcttttgattgacggcacgacgaacagtgaagccggaaaatgggcggctgcttacaaaaacatcagtgaaaatgactggtttataactgaatcccaaagagagatgccattttcgctcgtcgttgaagcaatggcccaaacggcggcttgcgcgggaattaccggcggtgacggcctcggtctcttatccgcggtgaagaaagcggaaaggttaggtgccgctttgccgggagaccgtctggatcttttttttgaggtcacgcgaatcagacgcggttttgtgttcggccgggcgaaagcgtccgttgccgggaagcctgtggcggaagctgagctcagcatatttatccagccatcgtaaaaaaagccgcctccatcggcggctttcggacaagcgtgttattttgtatcataatctctttcactttgtgaattgtccctttggtcatgtttgtgtttttcgtcattggcgttttccttcagctcttccagcggaatcggatcggttaaatcatgatgttcaggattttcattcggtttgttcttttgttttctttctttcatcctccatcacctcaatatttcttttcctcaacgttctccccgccaaacgcaggaagcggttttttgttcctgcgggtcatatgtattaaaatagagacgactacattataaaaagtgaggtacatatatgccgatacaaagagaagacgcagatattaaactgatcgcgattgatatggacggaaccctgctcaatgacgagcagctcatcccggaggaaaaccggcgggcgatcaaggaagcggaggcgaaaggaattcacgtcgtcatcagcacaggacgcacgctgatgacctgccgcgaactggctgagtctctcgagctgtcatcctttttaatcacggcaaacggcagcgaaatctgggattccaactttgagctggttgagcgcaagcttcttcataccgatcatattcaaaaattatgggatctgaggaataagcacaacacgaatttctgggcctctaccgtcgatagagtgtggagaggggaattcccggaaacgattacggatcatcagtggctcaagttcggattcgaaatcgaggatgacgaagtgcggaatgaggtgctgaaagagctcaaggaatacaaggagctcgagatcacaaactccagtccgatcaacatcgaagtcaatgccctcggtatcaacaaagcggctgcgctggcgaaggtatcggataaactcggcttcacgatggaaaatgtgatggccatgggtgacagtctgaatgacattgccatgattgaaaaagcgggtgtcggcgtcgccatggggaatgcgcaggacattgtgaaagaaacagctgactgggtgactgatgtcaacacggaaaacggggtcgccaaagcgatccgccactgggtgttataatagaaaaaagagagagtctcagtatgagactctcttttttttgttttgtcagatttgtgactaggtcccatggtaggttttctgacaaaaggatgttcaaacctgtcagaaataaatataatgaagagaaatccaacaattcggaatagtcattccgaatagcggaatgataatcatataaaacgtttacaatacaggagggatcttatgtttcagattgacatcaattgtgatttaggagagagtttcggtgcttataaaatcggactggatgaagagattttggattatgtgacatctgcaaacatcgcctgcggctttcatgcgggtgatcccagcgtgatgcgcaaaacggttgcgcttgcggcggaaaaaggcgtgaaaatcggcgctcatcccgggctgttcgatctgcagggattcgggcggcggcagatcgcgattacgcccgaggaagcgtatgatctgacgctgtatcaaatcggcgcgctgtcagggtttttaaaagcagaaggtgtcgagatgcagcatgtgaagccgcacggcgctttatataatatggccgccgtcaatcccggcctgtcagaagccatcgctcaggcggtctgtcattttgatcccgggcttattcttttcgggctttccggaagcgagctgattaaagcgggagatcgaatcggactgaggacggcaagcgaagtgtttgcggaccgcacctatcaggaagatggcacgctgacgccgcgttcagagccggatgcgctgattcaggatgacaaaaaagcggtcggtcaagtgattcaaatggtgaaagacagcacggtgacatcacgtaagggacaagctgtaagcctgaaagcggacacggtctgcattcacggagacggagcccacgccctcacattcgcaaaaacaatcaaaaaagaattaaaagcggcagacattcaaatcagcgcgctttcaaaagactgagcagcagagggaggaagacagcatggagcaaaagaaaaaaacagccggaaaggcttccggcaaatggtcgcttcttttaggcgcgacatttttgatggcgacatcatcaatcgggcccggctttctgacgcaaacggccacgtttaccaatacattggcggcaagcttcggatttatcattttaatttctattattttggacgttttcgcgcaaaccaatgtatggcggattatcgcggtttccggaaagcgcggccaagagattgccaatatggtgcttccgggcgccggttatgccattgcttttctggtcgtgctcggcggacttgcgtttaatatcggaaacatcggcggcgcgggtctcggtcttcaagtattattcgggatcaaaccggagatcggcgctttaatcagcgcagcggtcgcggtgctgatttttgtcataaaggaagccggaaaagtcatggaccgttttatgcagatcgccggaatcgtcatgatcgtattgactgtgtatgttgccgtaacgacggctccgccggtcggacacgccgttgtgaaaacttttatgcctgatcatatcagtgtgctggcgatcgtgacgcttgtcggcggcacggtcggcggatacattacatttgccggcggccaccgtttgcttgattcaggcatccaagggaaggaagtcctccctcaggttacgaaaagctccatcacaggcgttctgattacatcgattatgcggattgccctgtttctcgccgtgctcggcgtcgtctcaaagggcctgagcattgatcctgataatccggcggcttctgtattccggcttgcggcgggaaatgtaggctataaaattttcggcgtcatcatgtggtctgccgctatcacgtctgtcatcggcgccgcctatacatcggtatcatttttcaaatcattttcaacaaaaatagaaaagcactcacatggcgtcattatcggttttatcatcgtatccactcttatttttgttacgatcggccagcctgccaaaattctggtcgcggtcggttcgcttaacggcttaattctgccgcttgcattagcgatgattctgttgggcgcttataagaaaaaaatcgtcggcgattacaagcatccgatctggctcacgattgcaggggcgatcgtagtggttgtcatggcggttatgggcatctatacattatttacgcaaatgccgcagctatggagctgatgatatgaaaaaccatatgagtgacatgagccccgaagaagtcagacagctggtcaggaaggggcagatgaccgggccgacggcggggatggccgcttcttacgcacaagccaatctcgtcgttttgcaaaaggatctggcctttgattttctcttattctgccagcgcaatcaaaagccttgtccggtgctggatgtgacggatgcgggttcacccgttccggcaatagctgcgccgggagctgatatccggacggactttccgaaatacaggatttatcggcatggcgtgcttactgaagaggtaacggatattacgccgtattggaaggatgattatgtcgggtttttaatcggctgcagtttttcattcgagcaagcccttattaatcagcacattccaatcaggcacatcgatgagggtgtgaatgtccccatgtataaaacagacattgactgtgttcccgccggcccgttttctggaaagatggtcgtcagcatgagaccgattccggaaaggcttgcagtccgcgcggcgcaggtcacgtcacgttttcccgccgtgcacggcgcccccgtccgcatcggaaatccgcaaagcatcggtatcagcgatttgcatcagccggatttcggagatgccgtaacggtgcgggaaggtgaagttcccgtattctgggcttgcggcgttacgccccaggcggtgatcatggaagcaaagcctgacatcgtaataacacattcaccggggcacatgctgatcaccgatatacgaaatgaatcgcttgctgtcctgtaagtgagaaagaatacaacgaggtgatgacaatgatgcagtatagcggaaatacagcgcttgatatacagccgtacggtgattccgccgttatcatccgctttggcgggcacatcagcgaagaggtcaacagccgggtgcatgcggcggcagcctgtatggaagaacggccgtttccgggcttcgttgaatgtattccggcattcacaagcttaacgatcttttatgatgtgtatgccgtctcaaacataaaaaaaggcgtctctccttttgccctggtcaagaaagaagtgacagaacgtctcagccatataatgaccggccgcaaagaagagcgccgggtgatggaaatccccgtttgctacggcggtgatttcggtcccgatttagaagaggtcgctgagatgaacgatctgacctcggaagacgtcatccgcattcatactgaaggcgaatatctcgtttatatgctcggatttgcgccgggatttccgtttttaggaggaatgtctgagcggatcagagcgccgagaaaggcgtcgccaaggccgtccatcccggccggttcagtaggaatcgcgggaatgcagaccggtgtgtatccgatatccactcccggcggctggcagctgatcggcagcaccccgctccgtcttttcaggccggaagaacatccgccgagtcttttgagagcgggcgatacggtgaaattcgtccggatcacggcagaggagtacagccgcatcaaggagggagccgaatgagtatgaaagtggtaaagcccggtctcttgacgacggttcaggacacggggcggacgggatatcagaaatacggtgtgctgggaagcggggcaatggatacgatctcactgcgcatcgccaatcttcttgccggaaatcaagaaaaagaggcgggactggaaattacgctcatggggcccgggccttcctttgaattttcagaacctgcggttattgccgtcacgggagctgatttcgcccttcatattaatggggagcccgcccctctatggaaaccggttttgataaaggaaaacagcgtcgtctcattcgggccgtgcaagatggggagccgcgcttatctcgccgtcgcggggggatttgacgtgcccgccgtcatggaaagcaaaagcacgtatgtcagagcggggatcggcggtttttgcggaagagcgctgcaaaaagatgatgagctgccgctcggccgtatgacgccatgttcggaatcaatcgcgtaccgtctgagcgattctttcggacagcatggtttctcagcgcctgattggtctgtcagcagcagaggatttctgccgctgaaaaaaaatccggtcatacgagtgcttgaaggcgctcaatttcacgcttttacagaagaagcaaaattgcgttttcatcaagagtcatatacggtcacgcctcaatccgaccgaatgggctaccggctgaagggcgctccgcttgaattgcgggagccgctggagatggtatctgaggccgtgacgttcggaacagtgcaggtgccgccggacggcaatccgattattctgctggctgacagacagacgacggggggctatccgcggatggcgcatatcatatccgctgatcttcctctcgtcgcccaaacgatgccgggggaacatatcacgttccgggccgtttcgctggaggaagcggaactgctgcttttagagaaggaacagcagctgaaggagctgaaagcaaggctcaaaatggaatggctgatctgacaaaggggctaaagaccatggaaaacaaaaacaaaactgtcatcaaatcaatggaactgcttcatttgtttctgactgaaccgagcctgagcttaaatgagctggtttctctatcggaaatgccgaagacctcggttcaccggatggcaagctcgctggaggaaacgggatttctcacccgggcagcggacggccgttatcagcttggtctgatctttctacagttcggccagctcgtctctgaacgtctggacatcaggaaaatagccaaaccgattatggaagagctgtgcggcgaagtggatgaggccgttcagctgatcatgagggacggagatgaagccatttacgtcgaaaaaattgaaggcacccaaaccgtccgcctgtatacggcaatcggccgccggtcgccgctgtacgcgggagcgtgcgccagaagcattctatcgtttctgccaaaagaggagattgacacatacattcagaagacaaagcctgccgcaatcgcctcaggcacgatgacggatcgggctgaactgcttcaatccattgaaagatccttacaatcaggttatacgatcagctattcggaattagaagattacacggcggcgatcggggcgccgattttcaatcacgaaggtaaggtggctgccggaatcagcatcgccggcttcgaagcccgtttttcagaggacaggctgccgtatttaaccgaaaaggtcaaaaccgccgcacagcatatttctgagaaattgggttattgaccgagccaatttttcttcacgcgcgtacattacaatatcgatagtaacgagtggaggaaagtaaatgggacttgtttatacggcgctgggggattctttgacgacggggaggggatccgggccgttttccgccggttttgtacagcggttcgggcggatgatggcagaagatttacagacaagaaccgacgtatccatctttgccaaatcaggccttgagacgggagaaattctcgggcttatgtccttgccgtacattcagaggcggattcaggctgctgatatgattacgattacaggctgcggcaacgatttgatcgattcggttcaggcatatcagcaaacatcggacgcttcggtgttcaccagcgtgtccagtcactgccatgagaactttgaaaagatgattgccaagatcgctgccttaaaagggccgcacccgtctccttatgagatccgcgtcttcaatttatacaatcctttcccgggcatctccattgcagaaaaatggatatcctcttataatgcgcacctcagcacactcgcatcggcgccgcacgtcaaaattgccgacgtccacagcgctttcaaaggaaaaatgaatgaatatctctctcatgaccgcgtacaccccaacagcaaggggtatgaagtcatggcatgcgtcctgcgggggctcggatacggaagccttgcccgctcataaccgcgcgctccttttcatcgggagcgcgcttttcgtgctccttaaaacaaacttaaaattgtccgactttcgttctatccgcgcaaaaaatacgctagaataatgggggataaagacagaaatagaattgtgttcaaaaaatgataacagaaaggatggattgctttgctgcgcgccttaaaactgtcactcgcgatgctgattattatacttgcggccgccgcatttacgtatgcggaacatacctctgtcatacagccggttatgctcgtgtttctcggtgcggtcatgttcattcaggggctggaggaaaaacggaaagaaaacgacggctccgggaaattcaatatctataccgccgtttttgtatggtcaatctccttaatcggttttacgcttcacgcgatctgagtctgatagatcctgaaaatgctccacaacgggaaatggtgaataaaaacggtgcagtaaggctttccattcctgatattccggcgatccgcgaaagccttttgtatgatcttctaatgtctcccattccacaagcagcaaatatttatgcgtcttttccatacatttggacaaggaatgggacagataacctttcatgcccgcaataatcggctccgcccggcggaatgcctcttcgaattccccctcaagaccttcttttacatacagcatggctgcttctctgatcatctgaaattccccctttttttaatagatacattgtataagaatatggcccgtgacggcaggagaaacaaaaaaattttaaataatatgagaaaaaaatccttgccagcctgatttggtttaggagaaaataacagttggaaggcaggggaatagacagtgaaaaaagggttatacctattacttttactcgcaggaatcataggtttgatcggctgctcgaaaacggaatcggccgaagacagaatgaaagatttcgtaaaagactggaacggcggtcattacgataagatgtaccaaagcctcacccaggatgaaaagaaaaaacgatccaaaaaggattttataaagcgatatgaaaccgtttatgaacaagcaggggtcaaaaatctgaaagtcactgccgaaaaacaggacgaagacgacaagaaaaaagatgacctccagcacatcgattataaagtcagcatggatacaaaagcagggaaggtcgcttttgaaaacacggcagtcctgaaaaaagaaaaaacagacgatggagaatcgtggaacatcgactggaatccttcttttattttcaaacagctttccgatgacaaaaccgtgcagatcgcaaatgaagaaccgaagcgcggacaaatttacgacaaagacggaaaaggtctcgccgtgaataccgaggtgccggaaatcggcattatccctggaaaactcggcaaggataaagacagcgtgatcaaaaaactgtctgaaaaactggacctttctgaagacgatatcaaaagcaaattgaaccaaggctgggtaaaagacgactcctatgtcccgcttcaaaaaatcagaccggatgatgaaagcaaggtcaaaagcctgctcgcattagacggcgtgacgaaaacgaaagtcagctcccgctactatccgtacggcgaaaaagcggctcatctgaccggctatattaaaaccatcacagcggagcagctgaaaaaagcgaaagacggccaatacagcgatacttccaaaatcggcatcgccggccttgagaatgtatatgaagacaagctgcgcggcacgaccggctggaaaatttacgtcccgcaaacaggtgaggtcattgctgaaaagaaagccgaaagcgggcaggatattcatgtaacgattgatatgaaaacgcagacgaagctgtatgattctatgaaagatgacagcggagcggcagtcgccctcgaaccgcaaacgggagagaccctcgcgctcgtcagcgcaccgtcttatgacccgaacggctttattttcggctggggcggaaaagaatggaaaaagctgaatgaagataaaaacaatccgttttcagcgaaattcaacaaactttatgcgccgggatcaacgattaaaccgattgccgcggcagtcggcctgacaaacggcacattgaaagcgtcgaaaaagaaaaaaatcaccggaaaagagtggcagaaagattcaagctggggcggttaccatgtcacacgcgtatcagagcgcctgaatgaagtggatctcgaaaacgcgctgatcacatcggacaacatctactttgcgcaaaatgccatagatgccggagcggacgcgtttacaaaaggattaaaaacatttggctttgatgaagagattccgtaccaatttccgattgaaaagtcttcaatcgctaacggcaagcttgattccgagatccttctcggagatacgggctacggccaggggcagatgctgatgtctccgctgcacttagctgctgactataccgcatttgtaacagacggaaatctcgtcaaaccgacattgatcaaagacggagaaaaaacaccgcaaatctggcataagcaagtggtgtcgaaagccaatgccgaagaaatcacaaaagggctgagaggcgtcgttgaagatccgcgcggctctgcatatcagccggccgtaagcggcattaccgtagccggaaaaaccggtacagccgagctgaaaacgtctaaagaagataaagacggcaaagaaaacggctggtttgtcggttacgattataaaaagaaagacctcttgatcgcgatgatgattcaagacgtcaaaaaacgcggcggaagccattacgtcgttgaaaaagcgaaaaagcagtttcagaatcattaaatgacgatttttgcgggctgaaaggaaaatcggccgccgaagcagaatgaaacagcatgggcaattcctgaaaacagagatacaagaggctctaagaaaaagggggatttcacatgcagcgcattcaattggctgaagacctggaattttcaagagtgatacacgggctttggcgtctgaacgaatggaatgtttcagacggagagctgctgaatttgattgaatggtgtatcagccaaggcatcaccaccttcgaccatgccgatatatacggcggttatacgtgtgaaaagctgttcggcggcgctttgtccctttcgccttcaataagggagcgaatcgaaatcgtcacaaaatgcgggattgtcattgaatcaccggaacggcccggaaacaagtcgcatcattataatacgtcgaagtctcacattttagcgtcggcggagcagtcgctcttgaatctgaatacggattatctggatgtgctgctcattcacagaccggacccgcttatggacccggaggcggtggctgaagcgtttcatgcgctgaaaagctcgggaaaggtcagatatttcggagtatcgaactttaaagcgcaccagtacagaatgctcgaatcctatttggatgatccgctcatcacaaaccaaattgaaatctcggcgtacgagctggaaaatattcatgacggcacgctggatttctgtcaggaaaaacgcattccgccgatggcgtggtcaccgcttgcgggcgggagcgtctttaccggacaatcagataaggacgtccgtatccgtgccgcgcttcgttccgtacaggaagaaatcggcgccgcttccattgacgaagtcatgtacgcatggctgttcacccacccggcagacatcatgccgattgtcggcagcggaaaagagaaccgcatttccgccgcggtgcgtgcatccgcgtacaaactcagccatgatcagtggttccggatttataccggtgtccaaggctgcgatattccataaacagaacaaacgcccggaagctatcttccgggcgtttgtttatgtggtgtgcaatgtctaaaaacaagtaaggtcactttgaagtatagccgtgcggatcaagagtaacaagcgtcatggcatattatctgacacatttttctttttcaatactgtcacacggcccagtgccaaattgccatttgaaaatggttgaataatcattgaaagcgttttatattataacttacaccactttccccggcagcactccccatatgacatacttctcacaactagaaaatctggaggcgcgtttcatgtatatgacagcgagagaacaaaaattaatgaaacatctattactgcagaaccggtacgagacagtgcatgaactggcggaagctttacaagtcagcacaagaaccgttcaccgcgagttaaaaacaatcaaaccgataatggaatcattcggtctggcacttgataaacagcccggaaaaggactgaaagcggtaggaaacccggaggacaaacaaaaactcctgtcagacctgtcctatgaacagcatgaatacagcgctgaggagcggaaacttttaattctatgttcactattagagtctcaagagccgatcaagctctacagtctggcgaacgaactgcaagtgacaaacgcgacgatcagctatgacctggatgagctggagacttggattgcgcccttcggcttgacgctgatccgaaaaaggggcttcggcattcagctgacggggccggaaaatgcgaaacggaaaatcgtcggcaatctcatcgtcaaccgccttgatattcaaagctttttggaagcggttgaattgaatattaaaggaaaaccggacgatgctgaaaaaatgttcggcgtcgtaaataaagcggaacttttgaaaatggaccggctcttaattcagctcaaggaaaaaatcgcgatcgccttatctgacagctcatacatggcgcttgcggttcatttaacctttgcgatggaccggatcaggctcggagaaaccatcacgatggaggcttcggaactaaaagcgctgcagcagacgaaggagtacggctctgcgctggaaatggcaaaagagcttgaaaaagcgttcggcgtttcaattccggaagctgagatcggatatatcaccattcatttgcggagcgccaaccgcaaatacaaaacggaattcaaaccggaagacatagaggttgaaacggccttgcaaacgaagcagctgatcggcttcatttctgaaaaaattaaaattgatctgacggaaaacggttctttatacgacggtttaatcgcccatctggagcctgcgatcaaccgggtaaaagaaaatatcgacatgtacaacccgatgaccgagcaaattaaacgcgactactttctgctgtacatggccgtagaagaaggaatggaaaaattctttccggggcttcttttctctgataatgagatcgctttcatcgttcttcacttcggctccgctttggaaatcaaacgggaagaggcgaagatcaaagcgctgatcgtctgttcaagcggcatcgggtcgtccaaaatgctcgcatccaggctgaaaaaagagctttcggaaatccgttcctttgatatgtcttccctcatcgaactgaaggatcgagacatcaccgcgtatgacatgatcgtatccaccgttccgatcccgtatgaaaatattgattacgtcatggtcagtccgcttttaaacgaagaagacgctgatcaggtcaagcagtacatcaaaagaaaaattccgctgattcttgacaaaaaaagaaacggtaaaagagaagagaagcagccggagacgcctgatatgctggaagcggccggccgtatggcgcattacgcggcggttatccaaagcgtgctgcggaacttttcggtcaaatccattgattcaaacacggcgtatgagctgtttttgaaccgtatgtttgacatgctggagcaagaaggattggttcataatgcccaaaaaaccgcacagcgccttgctgagcgtgaacgacagggcggactcggcattccgggaacggcgatggccctgtaccatctcaaaaatgaagaaattgtcacgccttttttcaaaatttatgatttgacggctccatgcagtgtcaaaggcatggacggaaattccctgaccgtcgaccgcgctttggtgatgatggcgccggctgatatgcccgctgaaggggcggaaatactaagtgcggtcagctcggccatcatcgagtccgaagacagtataaaagccttccagacggaggatgaggccgatttatacaaacgtttaaacaagctgttttatcatttcattcaggagaaaggacagcggtaaacaggaagcgcacacctcatgtggggtgtgtttttttgtgcatgtatgagggtaaggggaagggaagaaactaaaaacacgggactattgtatcattcactgatggaatagttctaaaacaaaatagttttacaagttatattttttggtttaaaatgggttgcgtgagaaagaaaatctgacagagtttttttgtgatttatcattatgggagatgaaaatatggagacattacagcatctgattctgcatgacatttcaaatagcgaagagatcgaagctgtaaaaagcggtgcgcataccctgacctacgcggaatatcgaaaacgaatcaaccagcttgcacaagcgcttcttgataaaggaataaaaaaaggcgacagagtggcgatgctttgcaaaaacggccacgcggcatccattgtcatgtttgcggcactcgaaatcggcgcggtggttgtgccggtcagctggcaattaacaccttacgaaatgaaaggcattttagcagcctgtgaaccgaaagctgttttttacggcactgaatttaaagagatcatggaagaagtgcttcctgcgctggtatcttctcttaaactgaaggtcgagaccggaacagctgcggagacaacgcttcagtttgacgctttattgacaggctccggtgatacaccggatgtcgaaacggtgtctgaaaacgatacggcattgctgatgtttacctcaggtacaaccggcaatccgaaacgctgcatgatcactcacggcggcatatacaactacgtaaacgcgacattggcatacacggggagaatgcagcatgtccgcttcttagcatgccatccgaattaccatacgagcgcgattatctgccagatggtcggcacgatgagcggaacgacattcattatgacagacaatcaggaccctgtggaaaacctgaagctcatcgaaaaagaaaaaattcaaaccatcatggcgctgccagtctatttcacatacctgctgaaagcatgggaaacgcaccagactgacatgtcttctatcgtttatatgatgacgggaggcacaaaggtgccaagcagcctgatccagcagtatctcgacatcggcattccgctcatgcacggatacggaagcacggaagcgtggggcatcagctcttggaatccgcaaatgggaatggataaagccgcttccgcgggtaaaccgatggaagaagtggatgtccgcgttgtagatccggaaacaggtgaagtccttccgcaaggctcaatcggagaagtcgttgtgacaagtccgtttttattcaaaggctacgaaggtaacgaagaagcgacacgaaaagtgctgaaagacggttggttccataccggcgattccggatatgtggatgaagacggatttatctttatcaccggacgttataaagatgtcatcatctacggcggcgacaatatttatcccgaccagattgaagaggtcattcagcaagtgccgggcattctcgaaacggcggttgtcggtatccctgatccgctttacggtgaaaagccgaaagcgttcatcgtgacaaacggcagagaagacctgacagaagaagaagtgacccgattccttcaagaacgtcttgccgcctttaaaattccggaaattgagttcgtcagcgaacttccgaaaaacaaccttggaaaagtgagaaaagacgtgctccgcaaacaagcggtacgttcataattgaaaacaaaaacccggcttccagccgggtttttttcttgcgttccatgtgaaacatttttctccgaaaacgttttgaactgtctcaatcatgtttatccggaggactgccgaggtagacaagaaatatgagatcgaacaagaaggaggaacttgacatggaaaactatccgaaggaattcccggcggaatcacaaaaccgccagccgggcattgaaagcgaaatgaatccggcgcctgtttatgaatacaaagaatataaaggcgctgataaattaaaagggaaaaccgcacttatcacagggggcgacagcggtatcggacgcgccgtagcggttgcttacgcgaaggaaggcgcaaatgtcgcgatcgtctattttgatgaacacggtgatgcggaagatacaaaaaaacgagtggaagaagaaggcgtaaaatgtctgttaatccccggcgatgtcggtgaggaagacttttgcaatgaagcggttgaaaaaacggttgaagaattcgggcgtcttgatattctcgtgaataacgccgcggaacagcatccgaaagaaagcattaaagacatcacaagcgagcagcttcacagaacctttaaaacaaacttttactcacaattttatttgactaaaaaagcgattgattacatgaagccgggcagcgcgatcatcaatacgacatccattaatccttacacaggcaatccgcagctgattgactacacggctacaaaaggcgcgattaacggttttacgagatccatggcgcaagcgctcgtcaacgacggtatccgtgtcaacgccgtggcaccggggccgatctggacaccgcttattccggcgacattctcagaagaaacagtcgcttccttcggtcagactactccgatggggcgggcaggccagcctgttgagcatgtcggctgctatgtgctcttggcctcagatgaatcatcttatatgaccgggcagacgctgcatgtcaacggcggcaaatttgtaaccacataagggggctgaagcatgacgatatcgaaacatgatgtgaatgcatactatcaaaaagcgggaatcgttctgactgataatgaagtcgaagacattcaaatcatggattacggcttaggcaagcttgaggaaaccgggcttcagctgtttatttacgtgaataccgaccgctactgttcgaaagaattggtgctcttcccgcgccagacgtgtccggaacaccgccatccgccggtcggcggcgagaagggaaaacaagagacattccgctgccgctgggggaaggtgtatctctacgtggaaggcgaaaagacagagaacccaagcgtcctcccgccggaagaagacaaggaatactacaccgtctggcatgagattgtgcttgagccgggcggacaatacaccattccgccggatacgaagcattggtttcaagcgggagaagaaggggcggtcgtcacggaaatgtcatcgacaagcacggatgatcacgacattttcaccgacccgcgcatttaaggatgaggctgcacgcctcatcttttttgtatggaaaaaaatgaatttacctgtataatggctaataaaggaaagaaggtgcggtcgtgttttcctgtcaaatccgggaacatctgacgatcagattgcttgccaaagaagatacggacgaattgtattctgttatgaagcgaaatcaaaaccatctcagcgaatggctcagctgggcggaagacctggctgatatcgatacgtaccgcgatgtgatcatccccgaatggcgctataaatacgcggaagaaaatgggtttgacgccggaatttttgtgaagggccggttttgcggcatgatcagcatccataatgccgatacagccaatcaaaaagcagagatcggctactggctggatcgagagcatgaaggattcggcattatcaccgcaagctgccgggcggtcatcacccatgcatttcaggatctcggcctgaaccgcattatgatcagcgcggctgaaaaaaacacgaaaagcagggcagtggcggaacggctcggatttcagaaagaaggactgacgagagaaggcattttcgtacagggcgcctatcatgacacggtgaactacagcatgctgaagcgggaatggagcgaagatcggcagaatagcacatttcttggtttaaatgtctccccaatgtggaaaagtaacagtggagacgttaaaaaggagtgattcttcatgaatcaaaatgaaatcaaagaaaaagtgcttgaagtactggatcatcataaagtcggttcgcttgcgacggtagagcaaggcaaaccgcattcacgctacatgacatttttccatgacggcttaacgatttacacgccgacgagcaaagacactcataaagcggaagaaattgaaaacaatccgaatgttcatattctgttagggtatgactgtgaaggattcggagacgcttatgtggaagtggccggaaccgccaaactgaacaactcagccgatttaaaagaaaagctgtgggatccgaaactggaacgctggtttgacggaaaagacgatccgaacctggtgattcttgaaattgaaccgaagcagatcaagctcatgaacgcgggtgaaaaaacgccggccgagctggaactttaataaatcatttgattattcaggggcaatctgttatacttaattgctaagtgacaacatgcaaataaaaaagaaagtaaacttcttttttctgttttgatatagaagcttcaggcttcaacggacagcttgaaaaaaagctgagcttattcttttccttctgacattcgcccctaacgaagagatggaaaaaagactttttgttttacaattcacaccggcgcggcttcggagccgcagtgacgattgagaggtagggctttcgttgtcttgtgttcaagaacttccatggtgtttactttcgaagaatgattctgtcggaactgttaatacgaatcacccgcgggctaaggcgggcaaccatatattatttatttgcgtaagaaaagaataagacaaaaccgctccggacatccgggcggtttttttatgtaaacggccgaaacctcgccgcagtctgcagagtctaatcagtagaaaagatttggaggaatcatacattgcacgttattacttcacaagtactgtttatcttctgttttctgctgctgatacattcgattgaaacgcttgcctatgcaacacggctttccggcgcgagagtcggatttatcgcgtccgcactgtcattatttaatgtcatggtcatcgtgtctcgcatgtcaaacatggttcagcagccgtttaccggacatctgattgatgccgccggatcaaacgccctgtctcttgtgggcgcccagtttcgatttttaatattcggctccacggtcggaacgatgctcggcatctgtcttttgccgacattcgtcgcgttattctccagggcgattatacacttggcggacggaggaggctccgtcatgcaggtatttaaaaaaggattttcactgaacgggctgaagcatgcgcgttcttatatcagactgccgtcagtctcctatttaaaagggcttcaattccgaatgattccgaaacgcttgtttgtcattaatatggtcattacgtctatttacacgatcggtgttctgtccgctctgtacgccggccttctggcgcctgagcacagcacgaccgccgtgatggcatcaggcttaatcaacggagttgcgactatgctgttggctgtgtttgttgacccgaaagtatccgtactggcagacgatgtggcgaagggcaagcgcagctacgtctccttaaaatggacatcattgacgatggtgacatcaagggtggcgggcacgcttctcgcccagctcgtattcatccccggcgcttattatatcgcctgggtgacgaaatggatgtaacgcatgaaaaaagctcctctgcagaagaggagcttttttattgataatgtctcaggacgcgatcataaataaaattaccgaacggaataaaggccgcgataaaaccggcggctgaccatttcacatgccatttgacagtaaacgccgcatacgccagcaccgccagataaatgataaacaaaccgccgtgaatggaaccggcaatggtgacggcgagcggatgatgagcccaatacttcagcggcatcgcgataaacagcagcaccaaaagcgacattccttcaataaaccccatcgtgcgaagtctgccgatcggcgtgtgtaacatacagctccctcctgtcggacatcttttttcctctatactataagcaaagggcagtcctaatatgaccatttcgcgtcagttcctaaaaaacctttattaattcagcctgttgttcttgtcatttttcggatttctcttgataatatagccaaaagggtaaggaaggactacagtcatgaaactagataatgttgatctgagcatcattaaagagctgcagcgggacagccgcctgtccatgcgggaactgggcagaaaaatcaaattgtcagctccgtccgtcacagagcgtgtcagacagcttgaatccttcggcgtcattaagcgctatacattggacattgatcaaaaaaagatcgggcttcctgtttcctgcattgtcgaagcgacggtgaaaaacggaaaatacgatcaatttaaaacctacattcaatccattcccaacattgaattttgttttcgggtcgccggggcggcgtgttatatgctgaagatgaacgcggacagcctggaaacgatcgaacacttcatcaaccgcacctctccgtatgcccaaaccgtgacccacgtcattttctcagaaattgacacaaaaaacgtcctcgattagagagagcgtgaggaagtctgttataataacaggatgattgtgaaagaaagagaagtgaaaagcatgtcaaaaacagttgtattagctgaaaaaccttcagtcggccgggacttggcccgcgttctgaagtgtcataaaaaaggaaacggatatcttgaaggcgaccgctacatcgtcacatgggcgctcgggcatctggtaacgctcgctgaccctgaaggatacggcaaagaatttcaatcatggcggcttgaggatctgccgattattccggagcctttgaagctcgtcgtcattaaaaaaacaggaaaacagttcaatgcggtcaaagctcagcttgtccggaaagacgtcacccagatcgtaatcgctacagacgcaggacgggaaggggagcttgtggcccgctggattatcgaaaaggcaaacgtccgcaaacctattaagcggctgtggatttcctctgtgacggataaggcgattaaagaaggatttcaaaagctccgcagcggcaaagagtacgaaaacctgtatcattccgccgttgccagagcggaagcggattggatcgtcggcatcaacgcgacccgcgcgctgaccacaaaatttaacgcgcagctgtcatgcggacgcgtccagactccgacattggcgatgatcgccaagcgtgaagcggatattcaggcgttcaaacccgttccttattacggtctccgcgcggcggctgatcagatgacgctgacatggcaggataaaaaaacaaagcagacaagaacattcgatcagacggtgaccggccgtttggcaaaagatctccaaggaaagccggcggtcatttcagaattgaaaaaaacggcgaagaaaagcttcgctcccggtctttacgacttgacggaattgcagcgggacgctcataagcgcttcggtttctccgcaaaagagacgctgtccgtgcttcaaaagctgtatgaacagcataagcttgtcacttacccgcggacggattccagattcctttccgcagacatcgtgccgactttaaaagaccgtttaaacggcatggaagttaagccgtacgcacagtacgtcaatcaaatactgaagcggggcgtcaaagcacataaaggattcgtcaatgatgcgaaagtatcggatcaccatgccattattccgacagaggagccactgatcctttcaagcctcagcgacaaagaacgaaagctttacgatctgatcgccaaacgttttctcgccgtgttaatgccggcgttcgaatacgaggaaacaaaggtcacagccgatatcggcggcgaaacatttaccgcaaaagggaaaacggttcaatcgcctggctggaaagccgtgtatgatatgtacgaggatgacgacgatcatgaggaagacaaagaccagacgctcccggatcttcagcagggtcagcgcctcactgtctcatcattgaaagaaacgagcggacagacgaaaccgccggcgcgctttaatgaaggcacgctgttatccgcgatggagaacccaagcgcctttatgcagggagaagagaagaaccttgtaaaaacattgggtgaaaccggcggactcggaacagtggccacccgcgctgatatcattgaaaaactgttcaacagtttcttgatcgagaaaaaagaaaaagatattttcatcacgtcaaaagggaagcagctcttacagctcgtcccggaagatttaaaatcaccggccttaaccgctgagtgggagcaaaagctctccgccatcgcagcgggcaaactgaaatccgccgtcttcattaaagacatgaaaacatatgcgggcaaaacggtgaaggaaataaaaaacagcagccagactttcagacatgacaacatttcaggcaccgcctgccctgattgcggcaaaatgatgcttaaagtcaacggcaaacgcggcacgatgctcgtatgtcaggatcgtgagtgcggcagccggaaaacgctggcaagaaaaacaaacgcccgctgtccgaactgtcataagaaaatggagcttcgcggccagggcgaaggccaaaccttcgcatgtgtatgcggccaccgggagaaactgtccgtctttgaaaagcgcaaggcgaaagataaatccggacgcgcatccaagcgggacatcaactcttatatgaaaagccaaaacaaagaggagccgatgaacaacgcgctggcagaacagctgaaaaaactcggactggataaatagatcagagaaaggcagcatttgtaaagaaatgctgccttttgttgtgtttttaactgtaatgggaatacgatccagacgaagagggaaaaggtgagcagacggcgctcccatttaaaatttcccaatgtgaaaaaatgctagtattcttttatcgtttcctatatagtaaaaatactttgtgaaaaaataagatatgggtctaaaaaaggatttataaaataggaggatggactgtgaagcaattcgtttttcgtctgatgatccttttgatttcgatcgttctgacggcggggtgcgcggaggccggcactgaaaaacaggcggcggccgaaccgtccggaccgcttcagcccgcagagcattttatttatcataaattgatgaacgggcgggggatgatccggacgaacatatccggtgagccggaatatttatcagagtctctcggactatggatggcatttttgctgaacaggaaagatgaacggcagtttcaagcgcaatatcagcttctcaccgattcgtttctgacgaaaaacgagctcgtgtcgtggaagattgacgggaataaagcgagcggcaccaatgccttaattgacgatttcagaatcatgaactgtctgaatgaggccggaaccctatggggaaacagtgaatacgggaaaacagcggtacagatcgggaaagcgctggaaaaatacaatacgaatgacgggtattttacggattattatgatgccgcttcaaatgccgcgtcaaagaccgtgacgttgtcctatgtcgaccccggcgccttacagatgctcagagaaaaggggattatcgatgagaaaacggaaaaccggaacctcgatgttctcaatcttgcgcccctgaaaaatggttttctgccgaaatcgttcaataccgaaactaaggaatacaaatatgacagcgaagtcaatgtcatcgaccagctgtacgccgccgtgaatctgaagcggggagatggcaaagccgctgtgctgtcgaaatggatgataaaggaatttaagacgcgcggacagctgtacggacgatacagcgcagacacgaaggagccggcggttcaatacgaatcaccgtccgtttacgccctggccgttctttttttagcagaacaaaaagctgatccggctgtcatcaagccgctttatgaaagaatgacttcatttgaaacactggacacgctgaaacctgattacggcggctatatgagcgggggcgatacacattctttcgataacctgctgccgcttctggctgaaaggaaattgtttaatgaaaatatcattcaatgaatcacaaaaactgtgcagctacacagcagttatgctggtgctgctgtctttttttatttactatgcgtctcagcaatccgcagggcttctgataacctgcatcacattgcttgtcacgggagccggcatatggttcggggcaatctacgcgctcgtcatcaccttactcgtcttatttgttctcggcagcctgctcctgtggtttcagaccgggagctttatggcgtctgccgttgccgaaagtctgcaggtgctggtcatttgggggattgcgctgctgctcttttcttacatagcgggaaggattcacgagttggcgaaggggcttgagcgctcagtgaaacagctgcgtgaagagattacgagctttgttgccatcgacagggtgaccggctttgacaaccatctgcggatgaagctggagctttctgaggaaatcaagcgggcggaacgctacggcaattccttcgtctttttgctgctgcacatgcattatttcaaggaattcaaatccctctacggagaaaaagagaccgaccgcctgctggcatttatcagccgccaaatccggtcaagcgttcgggaaacagacaaaaaattcaggccgtccgccgaacggttcggcatcgtgctgacccatacgccagaagaacacatgccggccgttctggcgaagctgaaaaaggaattggatacgtaccggctgcaaaacggtaaatacgtctccatcaccttccgtgtatgttacttggcgtaccgaaaggatttacaaacggctgagcaatttttaaatgaactggaaaacgagatgatgatgaatgaactctaaatggatacgtctcttactctcggcgctcttcatgatttcggcggtttatgttccccttacggcggaagcaaaagacaaaaaggacggcattctcattatttatacaagcacggacggcaaagaaaccgctgaggtcaaaatgcttgatctgaccgcgggccatttctcatccgccgtcaccgtgaaaagcgacggagacatcacggccgcggacctcaaaaagaatcggcgcgtcatctattacggcgtcacgaaaaaaaagctcagcacatcattcgtgtctctgatcagcagcatgccgcagcagcttatcagcatcggctataacgccggacagttccgccaatttgcgggtttgtccctgacagagaaagaaacggtataccgcatttacggcaaagaagaaaaaacagacatgccgcttgaaaaagggatgtccgtgctcggcgtatcgggagtaaaaggaaagtccctttatacataccggtccggtgacggcagcacccgcccttttatgtggaaaacggcgcgctctgactattatttcggtgtgacgagcctgttaaatgattcgtttctgacggcgaaagcgctgcgcagcgctttcggagaatcagcgggcggcaccctcctttatttacggcttgaagacatcagtccgatgtcagatgaaacattgctttacgaagcgggcgcttacctgcataaaagacacattccgtttattctggcggtcattccggtctatctcaatccggaaaacggagaaaaagtatacttggcggacaagccgaaaatggtcagcgtcctgaaaaaacttcagcaaatgggcggcagcatcattattcacggctacacgcacgcataccgatacagcgaaacgggagaaggctttgaattttgggatgccaaagcggatcagccgatcacgtcagaaaatgcggatgatactccggtcaagcttgaaaaggaacaggattttccgaatgaaaaagcgtaccgggcgtatgtgaagcctttccgtgaaaaagaaaaaatctacacgagaacgaagctggagcaggcgattgacgatctgacagagctcggcctttacccgctgtcattcgaagcgccgcactatacgatgtctgaagaaggctataaaatcgcatcttcttatttctccagcattttcggacaagtacagctcagcggcacgacgtggaaaacctcgggcgcccctccgttcgtctcaaagccggctatgctggacgggatgacgctgtacccggaaacaatcggttatgccgataactcaaaggaaaatccgctcggagatatggagaatcatatttcgcagatgattgatttcggcggcggagtggcgggcggtttctaccatccgtatctcggcatgaagtacctccccgagctcgtcaatcagatggagcggattcccggcggcgagtggctcgatctgaagaaaacgaagcaaacggtaacgtcggacagcgtcaggatcaagacggacggagacggaaccattcatgtggaaaacaagattcatccgataacggcctttttcaatcaccatcagcagacgcctctggaaaaagcgctttggattctctccggcgtggtgttattgtttatcatcatgttcgcctgctacgttctttatttgcgcgccacattaaaaaaacgaatctttaaggagagaagaagccttgagtaacattctgttttttatctcattaagtttaatatgggtgatgcttctctatcacatgtttctgatgcagggcggattcaggcattatatgacctacgaacggaacattccgaaatggcgcgcaaagatgggggagctcccgaaggtcagcgtgctcattcccgcgcataatgaggaggtcgtcatcaggcagacgctgaaggcgatggtgaacctgtattatccgaaagacaggcttgagatcatcgtcgttaatgataattcctccgaccggacgggagacatcgtcaatgaattttcccgtcagtatgacttcattaaaatggtcatcacaaagcccccgaacgccggaaaaggaaaatcttcggcgctgaactcagggttcgcggaatcgaacggagacgtgatctgcgtgtatgatgcggacaacacgccggaaaaaatggcggtgtactacctggttctcggtctgatgaatgatgagaaagcgggagcggttgtcgggaaattccgtgtcatcaacgcggccaaaacgatcctgacgaagtttatcaatattgaaaccatctgctttcagtggatggcgcagggcggcagatggaaatggttcaaaatcgccaccatcccggggacgaacttcgcgatcaggcggagcattatcgaacagctcggcggctgggatgataaggcgctggcggaggataccgagctgaccatccgcgtctataatctcggctaccatatccgctttttcccggcggctgtgacatgggagcaggagcctgagacatggaaggtgtggtggcgccagcggacaagatgggcgcgcggcaatcaatacgtcgttctcaagtttttatcccaatttttcaagctgaaacggaagcggatcatcttcgatctgttttatttcttttttacgtattttttgtttttcttcggtgtgatcatgtcaaacacgatttttatcatcaatcttttttacgacctgcatctggctgtcgggtttttggcgatgattttgtggatactggcctttttcctgtttatgactgaggtcatgattactttaagcattgaaaaaacagaaatgaacaaacaaaacttctttatcgtatttctgatgtactttacatactcccaggcttggatcgtgctcgtcatctggtcattattcacagagatcaagcaccgcttgttcaagcaggaagtcaagtggtacaaaacggagcgatacaatcaaaataaaagcgggtgacctttttgaaaaaagcgatcatattgataactggccttttgctattgatgtataacgggcaggcggccgcggcccgggaactgaaaacggacggttccgccctcggaacaagcgccggcgcaaaagagcagcaggcgctgactggcgatctgatgacactgtacggggcgaaagacagcgcagagctgacctatcagattcctgcgggagcttcgaatgccgatcagtcgcttctgattgattacgaggcgtcaaacttattaattgccccgtcttctttaaccatcgccattgatgatgaacccatcaaatccataaagcttgacggcagttccaagcggaaaacggtgaagctcaacctcagcaaaagccaatccgcccaaggctttcacaatgtatcattacgattttacggcgtattaaaagagggcgtctgcgtcaggcaggatacgtcaggcaactggataaaaatttacccggacagccgccttgtgctttcagaagcaagcaagtcaaagggagcggatctcggccatttcccgtatccgtttgctcaatcaggcaatacgggtgaagaaacatatattatccttcctgacaaaccgacctcggcggaagctgaagccgcagtcaaaacagaagcatttctgaaaacggcagacagcaggctgaaggtatcctatgtaaaagaatccgacgccggcaaaatcagcaatccgtcaattgtcatcggcgctgatcagcattggaacgggaaaataaaagagcttttcgaacgcgggaacatcaaagcggaggacaacaaacttcttctcgctgaacgggttctgacatcaggggacaaacggcagcccgtcctgtttgtcacggcgcaatcagacaaaacgctggcggataaaatccgcgtcattacagacagcgcttattcaagccagctgggcggagatactttgacaatcggccgccttcagcctgctgcggaaaagacaggcaataaactgacactagaggacttcggcgcgggaaatgtaacggtcggatcaaacaaaacggcgtcagagcacttcttttaccctgcggcggccgctgttgataaagacggtaaggtcaagctttcacttacattaaaaacgtcggaatcgatccggacgaaggcggattcagcaaatgacgccgagagagcggagctgaacgtcatggtcaacggacagccgaatgcggtgcgtcttgatgatctcggtaataaagataaagacggcttttaccacgtctccatcccgattgatccgaagcttttgcgaagcagcaggtacattgatctgcaatttgtcacatcaggtttgaaacataacaatccgtgtatcgaccgtgacgaaaacaaatgggtctatattgataaaagcagcacgctgacgtatccggtaagcgatgcggcgcagaaagctgatttcgggcaatggccgctcccgtttgcgggcggcgggaaagagaaaacagtgatcgtcatcccggatggcgtaaacatacagacactgaaagaactttctctggtggcggattcattcggaaacggctttaccgtaaagacggcatcagacatgaaggaagcggatgccaaaggccggaatgttgtgtttatcggaggcctgccgcaaattccgcttttgaaatcaaacgcctctaagcttctcgtgccgtcagaccgcagcggagcttacgatgtttcttcgtttcagatgctgaatgagacgacgaaacaagtcgcgtttacccaggaatcaccttgggacgccggccggagcatcgctgtttttgctccgttatcaggaagcggcgcgtctgtcacaaaagagctgatcagctttttagacagcacaagcgatgccgcaaccgtcattaacgaaacagccggccggcagctgttttcgaatcatcagcaaatcaagtccgatgacagcagtccggcggctgatacgaagagccggtccgcagcactgaacgttacgtatattgctgttttcgcggcgcttatgatcattgcggccggtctgatctggctgacggcaagaaggaaaaaaagaaaaacggatcatgaaaaaagcgaagagtaatgaaggaaaaagaggccgttaacaagcctctttttttgtatttttatttccatttttggcggtgatttttttatttttgaaacagcataaaagcccctttacaactgaacgggacgggagtatgatctcttttataatctatatcgcttaatctgtaatcagagcgggggaaccaatttgcggcgcgtgatgccgcttggggtgaatcctttttcaggtagggccaactctcatcagcccgaatccgacagctaacctcgtaagcgttcatgagaggagatgaatgaaacctgtgcacgattatggcgcaggggcatccgtttgcctctgtgtctttttgctgtgctgaaatatggcatgcaatcagcattcggagacatcatagcagtaaggttttgtaaatcaaacggaaaatgaaaaaaaggggaagacaacaaatgtaccattcaatcaaaagatttttgattgggaaaccgctgaaatcacaggcggccggagagcagaaactcacgaaactcaaggcgctcgccatgctttcttcagacgcgctgtcatcagttgcttacggaacggaacagatcctgatcattttggctgcggtaagcgcggccgcgttttggtattccattccgatcgcagcgggtgttctcattttgctgcttgctttgattctgtcctacagacagattatttacgcttatccgcaaggcggaggcgcttatatggtttctaaagaaaatcttggtgagaagcccggcctgattgcgggcggctcattgcttgttgattatattctgacggtggcggtaagcatttctgccggaactgacgcgattacatcggcatttccggctttgcacccgcatcatttgctcattgctgttttgcttgtgattctgattatgattttaaatttgagaggactgtcagagtcggcgtccattttggcgtatcccgtctatctgtttgtggcggcgcttgtccttttgatcgtcgtcgggctgtttaagctcatgacgggccaggttcatccggccgagcatacaccaatcggcacgcccgtggcgggcatcacgctgtttttgctgctgaaggccttttcatccggctgttcggcgctgaccggtgttgaagccatttcaaacgcgatcccggcctttaaaaatcctccggcaaaaaacgcggcccgcactttggccatgatggggattctgctggcgatcttatttacggggattacggtgctggcgtacggctacggcacgggtccgaagcctaacgagaccgttatttcacaaatcgccgcggaaaccttcggccgccatacggtgtattatttcattcaaggcgttacatcattgattctcgtgcttgcggcgaatacgggcttttccgcatttccgcagctggcgtttaatttagcgcgcgatcagtatatgccgagaatgtttacggtccgaggcgaccggttaggattttcaaacggaatcatctttctcggtatcgcgtccatcctgctcattcttttattcggcggccgcacggaacatttaattccgctttatgccgtcggcgtgttcattccgtttacgctgtcgcagacgggaatgtgcatcaagtggatcaggcagaagccgaagggctgggcggtaaaaatgctgattaactcatgcggcgccgccatttcatttatggtgctgtgtattttattcgcgacgaagttcaatcttgtctggccggtgctgttattcatgcctgctgtcgtcatgctgttcttcgtcattaaaaatcactacaccgcggtcagcgaacagctgcgggtcgttgatcagcagcctgaggaaatcaggggaaccgtcgtcatcgtgcctgtcgccggtgtcaccaccgtcgtccaaaaatcgattcagtatgcgaaatcattatcagatcaggtcattgcggttcatgtttcctttgacagagaaaacgaaaaaaaggtggaaaagcgctgggaagaacttcataacggcgtccgcctcgtcaccctgcattcctcataccgcagtctggttcatccgtttgataagtttttagaaacggtcgaacagaaagcgaaaaaagaacagttctccgtgatggtgctgtttccgcaatttattacgaagaaacgctggcagaccatccttcacaaccaatcagccttcttgctccgcgtccggctgttttggaagaaggacataatcgtcgccaccctgccgtatcattttaaaaagtaacggaaagaccgcaggctaaaatgccgcggtcttttttgtaaaggaggacgacatggcacaaggcgcttttgtcatcatacaaaatgacgggcgggacatattgctcgtaaaacgaaaagacgttccactatgggatttgcccgggggcaggattgaagaaggtgaaacacctgaagccgcagccgtcagagaggccttcgaagaaaccgggtataacgtgaccatcctgcaaaaatccggtgagtatgaaaggccggcatttgaagatacacagcacgttttcatcggagccattaccggaggaacaccgctgatgaacggatcggaaaccgccgctttacgctggttttccccaaaccggctgccgctgttcatggtgccgaacagaaaacggcaaataaaagacggactcaatggggcggcaaatcgtaaggcagtccttaaagaccggaatctgttatccatccttgatctgctaagaaaaaagctgagagtatagcccgtgtttcaacccgtttgaaaaagggcatgaatacaggtaaaaggaggatgcagtatgccaagtaaaacagcaggacacgtaatgacggagctgcttgaacaatggggagtcggtcatatatacggcattcccggagacagcattaatgaatttatcgaagaactgagacatgaacggaataacctgacattcatccaaacccggcacgaagaagtcgcagccctggctgccgcggctgaggcaaaactgaccgggcagatcggtgtctgcctttcaatcgcaggaccgggggccgttcatctgctgaacggtttatatgacgccaaagcggacggcgttccggtgctggcgattgcgggacaggtggcttccgatgaaatcggccgtgacagctttcaggaaatcaaattagagcaaatgtttgaggacgtggcggtattcaaccagcaagtacatacggcagaagcgctgcccgatcttctgaatcaggcgatccgcacggcttacagcaaaaaaggcgttgccgttttaaccgtttctgatgatttattcgcgcaaaaaatcaaacgggagccggtttacacatcgccgatatacctcaaagctgatatagagccgaaaaaagaacatctcgtgacatgcgcgcaatatattaacaacgcaaaaaaaccggtcattctcgccggccaagggttaaaatcagcaaaggaggagctgctcgcattcgccgataaagcggccgctccgattgtcattacccttccggcaaaaggcgtcgtgcctgacagccatccccactttctcgggaatctcgggcaaatcggcacaaagcccgcctacgaagcaatggaggaatgcgatctgctgatcatgctcggcacatcgttcccatacagggattatctcccggatgatacgcccgccattcagcttgattcggatccggcgaaaatcggcaagcgctatcccgtcaatgcgggaatcgtcagtgatgcggctctggggctgaaagagctgacggaatacattgaatataaagaagacagaagatttttggacgcctgcaccgagcacatgaagcattggtggaaggaaatcgaaaaggatgaaaccgaagcgactcatccgctcaagccgcagcaggtcattgcccggcttcaggatgcggccgcagaggacgccgtcctgtcagtggatgtcggaacggttacggtgtggatggcccgccattttaaaatgaaaaagcaggactttatcgtctcaagctggctcgccacgatgggatgcgggcttcccggagcgattgctgcaagccttgccgaacctgagcggcagtccatcgccatttgcggagacggcggattttcaatggtgatgcaggacctgccgacggctgttaaatataaactgccgattacggttgtcgttttaaacaacgaaaatttaggcatgattgaatatgaacagcgggtcaaaggcaacattgactacgtcacccagctgcaaaatatggattacgccgcttttgcagaaagctgcggagcaaaagggatcaaagtgacgaaacacgaggaattggctcccgcttttcatgaagcgctcaactcaaatgagccggtcgtcatcgacgccgttatcggcgacgagccgccgcttccgggaaaaatcacttacggccaagcgaagggcttcagcaaatacatgttgaaaaacttctttgaaaaccaaaaaatcgaaatgccgtcactcaagaaaagcttaaaacggctgttttaaaaagccggcggttataaaaaaataaacaggcagcatgcctgtttatttttttatttgttgagcgacttggcttgcatatagccgtcctaaacggaaacggagattgtgaaaagccgcggctggcgagcgatggctgatcaaaaaacttatgaaggaccagtgcaattcatctcaagaacagccagagagcggtcacaacagcgatcataaagtaatctccctcattcagtgtagttccatttttgacaaacacacgtgccgtccggtttgtctttgtccctttcggggttttaagcgcaatgttcttccctatattgtaataaacaattttaaacaaataatatgccagcgaacagaataaaaagagcaacatgaacttgccaataaacaatatcatgtttcattactcccttttgcagttttttcgtttgaatatatgacggaaaagtcaggatgttatataaaaggagaagtattttacagaggctggtgttaaagattaatgaacggttcgccgcaacatccccagatccggaatcatttcaaaacgaaagagaagcccgaggattattaaaaaacagtcgctaatttgtccgcttttttttgaacatttgatctaagatgaacataaagagggtgaataagaaggacaccgtaatcatatctatcagaaatacattaggagtatcttttattaatagcagccataccacctgcaaaactaaagaaatagaaaaataggatatatatgtcatgattctcatatttgttacccccttagcctaatttctcttttgtgatcttatccaaattagtgaaaaggatatccaatcccgaaaataagagagtgatgaacaatgaaagaagaatttctccaccttgaaatatagatatgttctcaatgatatgattggaaacgtattggattgagaagtaaacagcagcccatgcaaaaatgaattcaaggatataggctgaccaagcaggcaatgtcaaaacatgagtcattccttttacaattgccgtaaggattagcatataaactaaagctaagatacttacgacgacagaaaatatgtataagtctgaaagtgaaccatagatgatatattctccgaaaaaatgatttacagttatagctgcaaaatacataactaggctaggtacagttatagcgaagaacagggagaatccaataagtacgatgaatgctgcatgagctaagcggtttggcggtgtatccacgatctctttttttaatagaatcataaaaataagagatgaaatcacaaggcagcataagaaagtgagcaaaacagtaaaaaagacagtcattttgacatctccaatgaaaaagtgctattagagtgaatctaacagcactttgcattacttcatacgtattttcctgacgatcatttatgaatgattttaaaatgctttcattgctaaagttgtcaattgagcgaggtttttagcctggctgtcagaaagtccggactttttaagtgagagataaagattcttttccacgtcagtccagcttaaggcgacatactcgttcagcattttctttaaaaccggttcgatgtgttcagtgaaaacggactcgagttcatttcttattttctttcctgctaatttttcaacaagattgaataattttgttttatttttcagcacttctctgattacatctttgactggttttgacacagatgcatcgctttgtgctttaagtccgtaggaaaattgcgtatcagtctgataaaaaaatgatttggtcgttccagtggcattggcagtattattatgattttctttagctaaggatgcggggacaaaagcagtagttacaagggctaaagatgcggcaaacagaatgcctttagctgcgtgtctaatgggaaatcctcctttagaaatgtagtgtagagagaaatgaaagactatgtatttaggcgggaccgatatgatccgctttgaacattttcccctctcagataccattctatcaataggtatttttggggtaaataggattttaatacagtatttttcttataattcaaaatcttctttagcaggattcattttggctgcagtttcgatgagatgggacatgggctggagcctatataacacatgtacaggctgattgaggcggaatcacattatcggagcggttttataatttagggttaatgaataaaaataaacaggcggcatgcctgtttattttcgtttgcgtgaaagagcgaagaaaaacgggaaggcggagccggccaataacgtaccgaataaaaacatgcccccgatgaacacatgatagttcaccccgccgatccaaagccccgtgattaaggaaacgatgcttaatgcgatcatcaaaaagccgggaatcagacgtttcttacccgttgtccgataagcaaaaagagaacagaagatgccgatgacaatcggcacaatccacagataaaaaaggataaatactgacataagcaaaactccgatttttcttctatcataccaaaaacgcccggaaaaagatacgaacggcacccggcgtcaaaagaaaaaccggccgcaatggccggtttttttctaacggaatgaatcgtagatcacaaacagattaagcgcgatcaccaaaaccgcaatcagccaggcgagagccgtcacccattttcggttcgtcagggcgcccatcaggcgtttgttgcttgtaaacataatcagcggcacgagcgcaaaggagatgccgaatgaaagaacgacctggctccatacgagcgcttctgtggcgttgacccccgagataatgatgatcatcggcggaatgatggtaatgaaacgccgcaaataaagcgggatacggtaacggatgaagccctgcatgataatatcgcctgacaatgtgccgacagaagagcttgaaagtcctgcggccagcagcccgatcccgaagagaatggctgaagccggtccgatatagtggccgaattgctgataagccacgtctaaatcttctacatacagcccgttcttgaagaaaagcgcggcagcgacgatgagcatgcttgcgttaatcgccccggcgatcaccatcgcgatgagaatgtcaatcgtctcgaatctaaaaatctttttccgctcactatccgtttttccgacgacacggcgctgtgtcagtgcggaatgtaagtaaatggcatgcggcatcacggttgcgccgagtatcccggttgccagaagcacactgtccattccgtcaattttcgggataaacagcccttcgagaacggaggcggcgtcaggtttggcaaagaaggtttgcagagcgaaggcgatcaccacgacgaacagaagtccggcgatgcccgcttccagcgcccggtaaccccggcgctgcagctctaaaatcgcgaatgatccgatcgccgcgataatggccgcttcaaccatcggtatgccgaacagcaggttgagtccgagcgccgccccgataaattctgccagatcagttgccataatcaccagttcaccctgtatccacagcccggctgatacccatttcggataccggtctctggcgatttccggaaggtttttacccgtggcaatgccgagcttcgcggaaagaacttgaattaaaaaagccatcaagtttgaaaagaggatgacccacagcagcatatacccatacttcgaaccagctgagatattcgtagcgaagtttcccggatcaatgtaggcaatcgccgcgataaaggcggggcctaaaaaaggcagaagccgcttgaatcccttgcttttgccgtcaagtgcatcctgcacggcttttgcttgcagtgattgtgctgagatgtctttgctcattatgtctcacctaaattccgatagatttttagctaaataacaaaaagtttcctagatgcaaattattttatctacatcataaatccgctattataagatgtcaagttctttatgttcaataaaccggcacattgatgccctgttttatctatgatatgtatcccgccgaagaaaggtccgaaaatgaaaacgacatcgttccgggaaagaagcgatgccgttcgcaaagcgtgtttccgcgtccgatcatgcgcggatgcgtggagcgttcttttaaaaaggtgaaaagaggacacttgcctaataacttcacaactttctgtccgcccaactgatttgagaaaaagacgctgtatttcctccgttttcccgggtaaatagaataataatgtttctttccattggaaggtaaaacctttctgtaccattcaaatgacctccggaaaaactccggccgctctgaataaacgtttgaatcaacgatatatcagtgattccagtccaataaaccgctgttatctatcaaaaaaagaatcggcatggtcacttgcgaagaaaagaagttggagcattagacttatttcagtctcccgggcgaaaaagtataataacgtcaggaaagctttccggccatatgataaaagagggggaattttcttggtacgtcgtttgtcgatcatgtctttagccatgatttttgctgtttctttattcgcttttggcggctctgcatcagcagcagctttcaaacctaaagctgaaccggacgtttccattttagccagcgggggcacagtcggtatttacggtgctaatatgcgctcatgctctaaggtcagctgttcaacgatcacaacattctcaagcggtaaaaaaattacaggttcttgggtaaccggagaatatgttcaaggccactacaccaattctaataaatggctgaaagtcacgtatgcaggagcgacaggctacgtttcagtcaccacgctatcttattattacggtttataatcagaaaaacctcgttctcttgagagcggggtttttcctttattccgattcaatttccgcgtttcgtttcatcatcgtgtttcatcagctgatcgatttcttccttagaagcgttttttttccactctttcgcctgacttgtcgcaatgggaatggcccgtccttcttcataaccctcatctaccatcgcattcgcgatttcgatcgcttttttcttcacaggttcctcgagattcttcaatgattgcggataatccttcatagaccaaggcatgtctatcactcctttatgaaaagtgtttcccgcctgaagaaaaagaaaaccgcctcatcaaaaagaatgacagctatttttacgagagaccagcaatttccgaataaaatataaaggataaagaagcaagtacagattgaatgcccaccacataagatcaaaatcaccgataaatacccaaaaggcaatcgcttgcaggcctgaacaaaaggtcagtacaagtgatattaatgcgaaagggcgccataacgcatgtttccgtttataaagaaacaagctgtacagcccggttatcgaaatgaaaatatctaagggaaagaatgaccagttccaggccatgatcatggcgttatcataatctttaaacaccatattttttggaatccactcaaaaaaagtaacaatccaataaacgataaatccaatatctgtaatgaggaagagaacctttaaccctttcattatctgtttctgtccgtatgaacgctgatgccgtttgatgacgtttcactttcagaaataaagtttaaggaaacgacaccgatgatgatcagaagaacagagacagcttttatgacagagaactgttcatgaaagaaaaaaattccgatcaccgaaatcagcacgatccccattccagaccagaccgcatacgcgatggagacacttatatatttcaaagtcaaagtaagaaaacaaaggctgccgatataaaacaataataataaaatacttgggacaagttttgtaaatccatttgataatttcatgctgaccgtacccaatacttcaaaaatgatcgctaaacttaaataaatccattgcattcaacattctccttcaatcgtattactcaaaattatacaataatacagaatttgaagaaaattaaacaatgggatgttttccggataaaaaatccgtccgggtgtaaaaagaaaacgccataaaggtatactatgaacaaagaaatcagaaaggacgtgcaggacgggtgacagaagagcggacagacctggaaagacaactgagagacattcaaaaatgggaaaaggcgcagcagagggtgatgttctggcaaacattcacccgcttgccgtttcagcttttggacaagctgacaccgcaatttattcagaggaaaatcggactcattctcgatgaaacgggaacgtttattcagtcaggcggacagtacctgacatcagaaaagcgcatcatgaaaaagtttcaaaaacggctgccgcacggtacatgtcaaacgcttcacgacatccgcaatgcgccgcttgccgtcatggacgaaatcgcagaagccatagcgcgtacaagcgtaaaggccgcgacggtgcagggagccgcaacgggagtcggcggcgtattcacgctggcggcagacattccggcgatgctcggcctgtccttaaagacgctgcaggatatcgcggttgcttacggctttgatccgaaagacaaaaaagaacgcgtgtttatcgtcaaattgctccagcttgcatccagtgacgtcatcggaaaaaaagcgatcctgcaagatttacggcaatatgatcaaaacgaccgcgcctatcagcgcgtcgcctcgcaaatccaaggctggcgggaagtcgtttacagctaccgcgatacgttcgccgcgaaaaaactgctgcaaatggttccggccgcaggcatcatcttcggcgcgtccgccaaccgttcagctttagaaagcatcgcggaaacaggcatcatgctttataaaaaacgccggattctaaaacgcctggacgatacagaatgataaaaaccacccgaaaacacattcaatgtgttttctttgtttagcagttctgaaatcgggaaaccaacaaccaacaccaattaaaggaggaattcaaaaatggcacaagataataacaaaatgagcagagaagaagcaggtcaaaaaggcggagaagcgacaagcaataaccatgacaaagaattctatcaggaaattggtcaaaaaggcggagaagccactagcaaaaatcacgacaaagaattctatcaggaaatcggtgaaaaaggcggagaagccactagcaaaaatcacgacaaagaattctatcaggaaatcggtgaaaaaggcggagaagccactagcaataaccatgacaaggaattctatcaagaaatcggccaaaaaggcggagaagccacaagcaaaaatcatgacaaagatttttataaggaaatcggccaaaaaggcggaaacagacgaagcagctaataaaagcataaaaggcagacaacctgcagatcaaaagcgatccggcgcatcagctggatcgctttttattttgggaaaatcttgatctgagccgccgttgcgatacaataaatgaaaaaggggtttttcactcgtgtctgacatgctgaatttgctcgctatcgccaataaagtcaaagaaaaacacgacaatttttcaatcgcggagatcaatgaccactgtgtgcgcctcgcagtgtttacgggagaatatgactggcaccatcaccctgactcagatgaatggttcatcgttctggaaggggagctgctgattgattttaaggacaaagaaaccgcagtgctcaaggcaaatgacagcctgctcatcccgaaaggcacgattcaccgcacccgctcttacgtcagaaccgtcaatctttgtgtcgagcatacgcatgcgaaaacagtcatcacagaggaacgtcatgctgatcaaaaaaattgtatgtgaaacagacgctgcaaacgctgaagcatttgcgcaagcacagtcaaggtggggagcattatcatgtgtaaatggattcgtcaaacaggccggcggctggcggaaaaacgcagacggcctgttcatcgcagagatcatcagcgtttgggagaacagacaggcctatgatgattttatggagaacgaacatgaccgcctatacgaagaaatcgagcagaaggctgcgattctttcaatagaagtgatgctgtacgaggaggatgaacctgtcattcacgagctgttacatcacccggacatccgatacgaaccggactggacggttctgaaggcataatgaaagcccaaaacagtttgttttgggcttgtgtctttactcgcgtccgggaagcgtgttgtggacatacggcgggacgggatccagcttagctatttcgccgtgcgctttcggttccttttcgtattcaaatggttctccgtccggcgctgtttccttcagccaattttgttcagcgctttctccgccatcagagaaatgaataagcttatgggagaatgactgtttttccagcgccttcgggaatgtggaaggaacgatcgggccttcctgtgcttctaattctttaatggccgcaagccattggttttgatgcatggtatcgcgggccaataaaaagctgagcatatctttcacgcctttatcatcggtcatttcatacaggcgtgcgacttgaagccttccttgtgattcggcgttcagattggcgcggaagtctgccagaaggtttccgcttgcgacgatatagcctgcgctccacggaacgcccgtgctgctctccggcattgcgccgagtcctgagacgatcgcatgatgcggattcatcccacctaaaatggacccgatgaccggatcatcagccgctttttcctgctctgccagcggggcgtcttctaacaatctcgcaatcatcgtcgcgatcatttcgacatggccgatttcttccgtcgcggtatccatcagaagatccttatatttttcattgccccgtgtattccatccttggaacaaatattgcatggcgacggatatttccccgtattgtccccctaaaatttcctgcatctgtttggcgaacagcgggtcaggacgatccggtttagccggatgctgcagttttttcgtatgtgtaaacatgtctccatctcctttttttgctctgtccctatttacttccccggcgggaaaagggatgaaacggagatgggcgtattggtcctgctaaggctcgcggcgcaaggataacaaatcctgcacaagcccgcggccgatcacctgttcatattgtccgtaaatcgggtcgaggcgtttcatccatgtgttcttttccgctttgctcagcacatgaatatgaatggatgaattcttctttatctcttcaagctggtctttattcattttctcagcggaggcttcgttccattctgtcgtttctctcatcgcctccgttaagatggctctcgttttttctgtctgcgaattccagaaatgctcgtcggtcatcacggcataaccgaggtacccgtgattgctgattgtcaaataatcttgaacattataaaattttttagaatagatatttgaaatcgtattttcttctccgtctacgagattgctttccaagagctgaaacgtggaattaaaggaatcctgccgcgggcgggcgccgagcaggcggtactggtcttcgatcacgctgctcggcatgatcctgagcgcctgtcctttcaaatcgtccggagtgaagatcggccctttatttgacgtaagctgcttaaacccgttcgtccagtacgccagtcctttcaaatgatgcttttctaatgaagcgaacaggcgtgtgccgattttgccgttgaggccttcttgcacggctttatagtttgtaaacgcgtacggcagatccaaaacaccccattcgggagacagtgatccgagctttgaggtggagggagcgatgaattgcacgtccccgttttggagggcgtttatttcttcattatctgaatagaggctcccgtttggaaacacctctactttaatggtgccgccggacttttgatagaccaggtcggcaaacttattcgccgcccgcccttttggcgtgttctcagcaacgacatggctgaatttgaaaacgatttgatctttcaggccttcctgttcgtcatcataatacggttcttccgttgagaaacgatcatgaaagccgatgaataaagcggttccgataccgagtaccatcaggctgagacaagtcagcaagcttttcatcgaaaaccccctccgccattttctataacaagcataatcgggcgggccgttttcgtaaagagacggaaaggaagaggccaatgacgaaaaaaaagctcaccatccgctggaaaatcaccatactttcgtatatcgtcgtgctttttacctttttgatcgtcggcatcgtgctgatcggcaatattcagcatacagaggagcgcgagctgaaaaaacggctgatgaataccgcgcggacggtatctgagatgaccgatgtcaaacgcgccctcgagcagaaaaaacaaagggaagacgtgcgccatgcggtcgaagaaataaggatcatcaatgaagcggactacatcgtcgtcatggatatggatcatatccgctattcacatcccgtcagcacaatgatcggaaagcgttcaaggggtgaggacgaagccgcggcgttcgccgagcacatttatttttccgaagcaaagggagaaatcggcaccgccgtccgcgctttttatcccatcaaagaccgggatttgaatcagatcggcgtcgttctggccggtaaaacgctgcccggattcggtgaaattcttcttcagctgaaacatgaaatactgtttatcgttctgctggcgctcgggttcggactggccggctcctttttgctggcccgccatatcaaaaaacaaatgttttggctggagccccatgagatcgtgagaatgtatgaggaacggaccgctacgtttcattcaatgaatgagggcgtcatcgcgatcgataatcagcatcacatcaccatttttaatgaaaaagcgaagcagatattcaatgtcagacaagagaccgatggcaggctgatctgggacgtgttaaaagattcgcgcctccctgagatcgtcgagcggaaccgagccgtatataatgaagaaatccaagtcagcggaaaggtgatcatgagcagcagaattccgatcgtcatgaaaaagaaggtcatcggagccgtcgccatttttcaggacaggacggaagcggcgaaaatggcggaagaactgacaggtgtgaaaaattttgtcgatgcgctcagagttcaaaatcatgaacatatgaacaagcttcacaccatcgcgggactgattcagctcggaaaatcagaaaaagcgctccagcttgcttttaaggaatcatcagaacaagaaagcgtcaccgattttcttcatcaggccattcagaatgacgctgcggcgggactgctgttaagcaaaatcaaaagaggaaaagagcttggcatttctgtgaaaattgatgaaaacagcagtttctcggcatttccggagcatgtcgaccagcatgacattgtcgtcctgctcggcaatttaatcgagaatgcgttcggcgcattcgaaacagcggacacggaggacaaacatattgacatcagtatcgagcaaaatgatgaagtgcttgctatattaatagaagacaacggaagcgggatttccgatcagcacatcccgcgcctttatgacaaagggtttaccgtcaataaaacgggaggaacgggatatggcttgtacctcgtcaaacaaatcgtcgacaaagggatgggcgttattgaagtcgacacacggcagggacagggaacggcattttctattttatttccgatgaagggggaggaatcattcgatggacatcaaggtgctgcttattgaagatgatccgatggtgcaggaggtgaataaagaatttatcaccggtgtttcggggttcagcgtcatcgccacagccgctgacggagacgagggaatcaggcttattaaagatctgcggcccgggctcgtggtattagacgtatacatgccgaaaaaagacggaattaaaacgctccaggaaatcagaaaacaaaagctcgaagtggacgtcatcatcgtctcggccgcaaaagacaaagaaacaatccagcttatgctgcaaaacggtgcggccgactatattttgaagccgtttaagctggagcggatgagacaggcgctcgaaaactataaacaatataaacggaaaattgaagagcatgacaccatgtcgcaagagcagcttgacatgctgcttaaaattccgcaaaatccgtcccgcgatctgccgaaggggttaaatcattttacgatgaatgaaattttgacctatatgaaacagcagacggagccgctttcagctgaagaagccgccaaagcgctcggaatcgccagggtgacagcgcggcgttatcttgattttcttgaaaaagacggccagattaagctcgacattcaatacgggggagtgggccggccggttaaccgctacaaattcgtccgctagccgagaccaaaaagaccaaaatgtccgttatgatcataagcttcccctctttgtttgaaaacgctatcattttgtatagacgcagcgagaggcaagggggagtagggatgaaaattttcaaaaatcttacggtgcaggtcatcacggcggttatcatcggcgtcattgtcggactcgtatggcctgaggccgggaagcagatgaagccgctcggcgatacatttatcaatgcggtaaaaatgattatcgcaccgatcatattcctgacgatcgtgcttggcatcgccaagatgggagacatgaaaaaagtcggcaaagtcgggggaaaagcatttatttattttgaagtcgtgaccaccatcgcccttattatcggacttctggtcgtcaatatcatgaaacccggtgaggggcttgattacagcaagcttgaaaaaggggatgtctctcagtacacgcaaaacgggggacaggggattgactggattgaatttatcactcacatcgttccgtcaaatatggttgacgctttcgcaaaaggcgacattcttcaggtcttattcttttctgttttattcggtgtcggcctggcggcgctcggtgaaagaggcaaaagcattattgatttctttgataaactgtcgcatgtttttttcaaaatcatcggctacatcatgcgatcggcgccgatcggcgcattcggagccatggcctatacgatcgggcacttcggccttgattccatcaagccgctggcgagtctgatgctgtctgtatacgttacgatgttcctgtttgtatttgtcgctttgaatatcatttgcaaactattcggtttcagcttgtggaactatctccgttttattaaagatgaactgctcatcgttctcggcacaagctcttctgagtccgtccttccgcggatgatggataaaatggagcgctacggctgttccaaatcggttgtcggccttgtcattccgacgggatattcttttaacctggacggcacctcgatttatctgtccatggcgacggtttttctggcgcaggtgttcggcgttgaccttaccatcggccagcaggttacgatcattctcgtgctgatgctgacatcaaaaggcgcggcgggcgtaaccggaagcggatttatcgtgctcgcctccactttatcggcgcttcaggttattccgctggagggactggcgctgctcctcggcgtcgaccgctttatgagtgaaggaagggcgatcgtcaacctgatcggaaacggaatcgccaccatcatcgtagccaagagcgaaaatgagtttgacgaagcgaaaagcacacaggccgtaaaagaaatgaaaacggcggtataaaaggaaaggaacggcatgcatcgggcatgccgttctttttttcggccgccatgagtaaaaaagataaatttgtttaaatttattaggaggtggacaaagaccttagcgtcattttgttatataatttacaattagagagtgaaagatgaaatctaagggctttttgtcctagcaggagtgtataaatggcggctatttttaaattttttcagcatccgggtgtcagacgtttttccgtttttcttgttttgactggggtgttagttgtattccgaagtatgattaatttgattttgcttacgtttatttttacttttctgatggatcggctggagactgtcatccggcacgtgttgaaccattttttccggatcagccagagggtggtcatcaccgttttatatattgcgctggctgtcggggcgactgtcggaggctttgtcttttacccgattgttgccaagcagattgaacagctgattaagcagatcaagcacatcgcgtatcatcccgatgtcattccgttttatgatgagatatcgagcgtgttcggcgatatcaatatcggttcctatgtaaaagaaggttttaatgtactgtatacatacttggccgatatcagcactttcggtttgcaggtcgtgatgtcactgattctcagcatgtttttcctgttcgagaaaaagcggctcacggagtttatgaaaaaatttcagcacagcaagctgtctgttttttactacgaacttgcttatttcggcagcaagtttgcgagaacattcggcaaagtgcttgaagcccaatttattatcgcgctggtgaactgtatcctcaccttgatcgcattggcgattctgcattttccgcagctgttcggcctgtcaatcatggtctttttcctcgggctcattcccgttgcgggtgtggtgatttcgctcattccgctcagcatcatcgcatatacgacgggcggcgcagcgtatgtcatctacatcgtgctggtcattttcgtcatccatgcgattgagacgtacttccttaatccgaaactgatgtcagcgaaaacggaactgccgatcttttttacctttacagttctgattttctcggaacatttcttcggcatttggggcttgattatcggaattccgatttttgtgttcctgcttgatattctggatgtcgtcaataatgaagagaaggaaaaaaacggaccggtcccggataagacataacgtcggctccggctcttcacgaatatatgactaatgttataatgcagacagtgcctttgtacgggcactgtttattttttgtgaaaaaggaggaaggctgtatgactgagccgattttacatattgaaggccttgacaaaacaataggcaaaaagcacattttaaaaaacatcagcatggatgtcaggcagggcgagatcatcggtttgctcggtccgaacgggtcgggaaaaaccacacttatccgaatcatcgtcggtcttttaaagaaaaacagcggcacgattacaattaacggctttcagcacgatgctgatttcgaaaaagcgcttgaatccgtcggagcgatcgtggaaaatcctgaattctacccgtacctgacggggtgggaaaatctgaagcactttgccaacatgcacaaaaacatcaaagaggacaggcttcaggaagtcatcgaacgggtcgggctcaccaatgccgttcatgacaaagttaaaacgtattcccttggtatgcgtcagcgtctcgggattgcgcaggccattcttcaccgtccgaatctgctcattttagatgaaccgacaaacgggcttgatcccggcggaatgaaggatttccgcgatcacttaaaggaactcgcggagcttgaagggacgagcatcctttttgcgacgcatttattgcgtgaagtggaggacctttgcgaccgtgtcatcatcattcaaaaaggtgagatcaaaacagaggttgttctgcgcggcgctgaggaaaaagaagaaaaagccgtcctcgacattcagccggctgacgaagcattcgaatggctgtcccaacagcaatttgctccggagaaaaacggcgggggcattaccgtcaccgtagcgaagaaggacatcccggcattaaaccgtgcgctcgtcggacaagactttctcgtgtattccatcatgccgtatgcggaatcgctggaggatgaattcatgaaagtgacgacggcgcttcaagaggagggggagacgaatgtttaaattgacagcgaatgagcatatgaaactctttaaccgaaaagtctcattagtggcgctgattctgatggccgttctccaatttattatggcgcttgtcattaaacggcttgtcatcagttccggaacggatgagaatttcatcggctatatggcgtacgcgcccgggctgaatattctgcttgaggcattaacgatcgtgatcgcggcaacgatcatttccgctgaatttgataagaaaacgatcaaatttttgttaatccgcccggtaaagcgggagcggatttttgtatctaaactcattaccgtatttttggtcagcttgtacctgtatgcggcgtactatattttgtctctgctgttcggcatggctttcttcggcgtgtcggtgacatctgaatcagggacgcttcttatgaacaccctgaaagtaatcggcacgaactgggtcgaggcgtttgcgatggcatgctttggcttgctgtgttcttctgtattccgaaacagcgcaacggccgtcattttgtcatttatcgtgctgtatggcgcaaaatcactcgtgacgattatgtcgctcttccaaaacaaatggggaagttttctgctgtttgcaaatactgacctgacgcaatatatgagcggggcgaaaccgctgtttgcgggaatgacgccgttattttccgcaggcattatcattatccatatcgtattcttcttagccgtcgcttggtggagcttttgcaaacgcgatgttcgggtataaagtaaaggaatgacatttttgtgaaaaagatcacgataaatcaataatttatgctattttgatttataataaaggtaatgacggaggtgctcacttgagaaattttattaccgcattaccgattgtgttattgcttggtttttcctttgtgtcattcatgttccaattcgaacatcttgtttatttcaggcttgcgctgggtttgttttctacagtggggctgtttctcttatataaaatgaagtcgggattccgttatttcatcatctacctgtatgcaagctggatcgtgcttgcggcggttaccgcgtttgaagagccgattttttcaagctttttctttggcgggcttgtgatgacgatgggttatctcacatatatgctgatttatctcgggcttaagcaggaccgcggcccggaagcagtctgaacgcgctattccatggaatagcgtgttttttttgtacagcctcacagttgcgaaacgagacttgaatctctataatacttattaactttatcggaattataatggggggattccagtgtctttatggatacagaatgaacggcagagggaatggatggaaaaaatcggcctgcttgcagacgaatttcaaaaaacagccgcgcttgatgatgaggcgggccgttttcccgctgagaaaattcaaagactgcgcgacgcgggatatacggcgttaacagtacctgaggtattcggcggtgcaggcatttccgtttatgatatggtgctgtttcaggaacggctggcgcggggagacgcggccgttgctctcggaatcggctggcatttatccgtcatgggtgagctcggagaaggaaacagctgggatgaagatgtcttttcatttatcacagaagaggtgaaaaatggagctgtcctgaacagggcagcgacggaacggcagaccggcagtccgacgaggggaggaagacccggcacctccgctgtcaaaaaagacggaaaatgggtgctgaacggccgaaaaacctttacaaccctttcactgactttggattatatgcttgtgacggcatggattgaagaaaaacaaacgaccggtgtttttctcattcataaagatcagtcaggcgtttcagtcgaagaaacatgggatatgattgccatgaaggcgaccggaagccatgatctccttttagatcatgtcacggtcagtgacgagcggcttgtggagcttatcagcgggccgagagcggcgaaagtgaatggctggctgcttcacattcccgctgcttatctgggcatcgctcaagcggcaagggactatgccgtccggtttgcatccgaatattcgccgaacagcctgaacggaccgattaaagacgtgccggccgttcagcagcgtgtcggggaaatggagcttgaattgttaaaagcgagacagtttctcttcacggcggcgcaaatgtatgatgacccgaaacgccgccctttcatcaaaagcgagctcggcatcgcaaaacatattgtgacaaatgccgtcctttctgttgttgataaagcaatgagaatcaccggcgcaaaaagcctggagcgaaataatccgcttcagcggtattatcgggatgcccgggccggccttcacaatccgccgatggacgatgcggtcatcggcaaattagcggcggaagcctttgagcaataaaaaaagagcctgaaaaaggctctttttatgtatggctgttgtgccggagcagtttttgatgcttgcggtcaattctgtcatagatcacattcatcagcttttgattattcataatggccgccttgttttcttttatcagctgttcgtatgtttttattttacgtttcgccatgagcccgcaccttcctaacatatttgtattcgctttctaattctccgagcgataattcatataaatgccgttccgactttttgtatattccgttattgatcagcaaatggatcagatgtttttttcgtccttcaactgatgatctgagctgaggagaagacctcatgattaccctcctaatcaaatgatattgataatcattatcagttaatgaaagtatacaatgggcatattcatatgtaaagggaaaataccgccaatttttcgacaaaaagtttcccggggaataatgctgtcgaatattgcatttgctcagatcaaagctgctatttttccgcttttccatccatactatgaatgagaatggaggagtccttacatgaatgatcaaacggcaaacttaaaacggggcgagaaaggcgcgattcttaatatcgccgcgtacctcatccttgccgccgtcaaactggtgatcggtcttatttatcattccgaagcgctcagagcggacgggttaaataatgccacggatattgtcgcatcactggctgtgctgatcgggctccggatttcccagcgccccgcggacagtgatcatgcttacggacattatcgggctgaaacaatttcttctttaattgcgtcttttattatgatggcggtcggtattgaagtgctgatcggaggggcaaaggcgattgtcaacggaacggaggccgagccgagcttcattgcggcatggacggcgctcggaagcgcgattgtaatgtacggcatgtatgtatataacagccgtcttgcagatcgggttaaaagttctgcgcttcatgcggcggcgaaagacagccgttctgacgcctatgtcagtattggggcgtttataggcgtcttaacggcccggcttcatctgccgtggattgatccggtcattgcttttctgatcggaatcatcatctgtaagacggcatgggacatcttcaaagatgcttcccactcattgacggacgggtttgatctgaaagatttggagccgtataaacacacggtgaaagaaataaaagaggtcagcaggctgaaggatgtgaaagcaaggtatttggggagcacggttcatgtggaaatggtcattacggtagatccgggactgtctgtgaaagaaggccatgaagtagccgatgaagtcgagtatacaataaaacatgaacatgatgtgactcatgtccatgttcatgtagagcctgaagtcataaacaaagatcgtgaaacgaattaaatatgctgtgataaaaactctgtgacttcttcgggcgttttcgcgtttgcgctgtgaagatgcgctttcttttcaccgtttttaaagatcagaaggctcggtatgcccattacctgatatttgtcggcaagctcagggagctcgtctctgttcagttcataccaatcattttgattatattcttccaaaatatcgccgatgaacatattcatgcgcgtgcagtcagggcaccagtcagcgaaaaatttcacgatgatttccttgtcggattgaataagttcattaaattgttctgttgtactgatttttttcatatgacacatctccttttccatgccattttaatataaaataaaaaggaattacatacaaatgctttcatattcagaatgcccaaaaataattagatcattttctgaggaaagtgataagatagtaaagatgaattgttgtggggggaatatccattgaaaacaagtctaggattggtgtacggcggaaagtcagccgaacacaatgtatcgctgcagacagcattagctgtaacaaaagcgcttaatactgagaagtttgatatacatccgatttacatcactgaaaaaggagaatggcaaagaggcccgctgctgactgagccggtttccaacgtgaaaatgcttcagctggaacaaaacggtgaaagtttcgctctatcagcattgaaccgggaaatgtttcctgaagcgtcgcctgacgaaaaggcgccgatcgatgtcgtatttccgcttctccacggaccgaacggtgaagacggcaccattcagggtctgctggaattgctgaacgttccttatgtcggcaacggggtgcttgcatcatcagccggcatggataaagtcatcatgaagcatttgttcgctcaagcggggcttccgcaggcgaagtacgccgctttcttaaaaaaggactggaaacagacaccggacagctgcttacagcaggttgaagaggagctgggatatccgtgcttcgtcaaaccggcgaacctcggatcaagcgtcggaatcagcaaatgccgaaaccgtgaagagcttgaaaaagccttcgaactggcttttgaatatgaccggaaaattgtggtggaagaaggaatcgccggcagagaaatcgaaatcggcgtactcggaaatgacgaaccgaaatgctccgccgtcggtgaaatcgcgccgaaaaccgacttttacgattacaaagcgaaatatgaagacggcgacacggatttaatgattcccgcgcaagtgacggatgaacaatatgcggaaatcagcgagatggcgattaaagccttcaaagcgattgacggctcaggccttgttcgcgccgatttcttcctgaccaatgacggtcaagtgctcattaacgaagtgaacacaatgccgggctttacgccattcagcatgttcccgctgctttggaaagaagcaggtgtagattacagtgatctgatcgaacagctggttgagctggcaaaagaacgccatgccgaaaaacagctgattaaacatacattttaatgaagacggacactgcctgaaggggcagtgtcttttcccgtaacagacaacattttcagaaagcgaggtgccacctttgataaagcgaactgtaaaacgaatcgcagacatggtcaaaggcacactgacaaatcccgaatttgaacaaacaatgattgagggcgccgcaaccgatacgcggactttggaaaaaaatcagctgttcattcctttaaaaggcgagcattttaacggccatacctttgtgccgcaagcattcgaaaaaggcgtttccgcggtgttgtgggaccgctctgaaccgaatccgccggaagggcgtgctgtcatcctggtcgatgacacgctggaggcgctgcaaacattggcaaaagcttatttgaaagagctcggcacaagggttatcggggtgaccgggagcaacggaaaaacgacaacgaaagacatgcttcacgccgttctcggcacgcagtaccgcgttcacaaaaccgccggcaatttcaacaatcatatcggcctgccgctgactgtgcttgccatgcctgaagatacagaaatcgccgttttagaaatgggaatgagcgcgaggggcgaaattgattttctgagccgtcttgctgaaccggaagcggccgtcattaccaatatcggcgaatcccacatgcaggatttaggctcaagagaaggaattgcggaggcgaaacttgaaattataaacggacttcgggaagacggcgttctgttttatttcggggatgagccgctgctccgccaaaagacgtacacttgccggacaacgacatacggcgcaggcgcggacaatgatctccgcctgaaagaaataaaacaggcggaagaaggcacgtacttcaatatcgacggaatcgaccgttctttctttattccggttctcggcagacataatgtgatgaatgccatggccgcatacgccgccggcatctatttcggcattacgccggaaaatgccgctctgggactgagccgcctgaaggtgacggggatgagattggaactggtcaaaacggacaacggcatctcgatcgtaaacgacgcatataatgcgagcccgacgtcaatgaaagcggcggtcgaattaatcgaaacgatgaaaggctatcggaagaaaatgctcgttctcggtgatatgcttgaacttggtgatgaagaaaaagcattccacgaagaatgcggagctgcggtcaatccggcggaaatcgaccatgtatttacttacggcacactcggcgcattcatcgctgacggagcgcgccggcattttgaagaagggcgcgtcagccattatcttgacaaaaaagaactgcttcacgccatacagaaaatggccgcttccggcgatctccttctgtttaaagcatcgagaggtatgaagctcgaagaaatcgttaaagatttattagagaagaactgaaaaaatactgatcagcattataaaaatatacaaaaatgaagaaactaattcagggtgaaataattctgtccgtatgaaaaagaaagaccgccggctgggaaatcccgtccggcgcgggggctagcctcgttcgcgggaagaatccggtcaggccgcttccggccgcctgaccatctcgccttattgaaaaacacatagtgtaatggtaagattaaacgtaaagtaattcgggctttgtatacgtatgatcctgtcctttggatgaaagggcggtttttagtggtaaatcacgacattactgaaacagcaatcagaaggagtttgaataatttgactataacgtttcaagatttccaattaagttctgatctcatgaaatcaatcaatcgtatgggatttgaagaagcaacaccgatccaggcacaaacgattccgctcggacttttaaataaagatgtcatcggacaagcgcaaacaggtacaggtaaaacagctgcgttcggtataccccttgttgaaaaaatgaaccccgagtctcctaatattcaagcaatcgtaatcgcgccaacccgtgaattagccattcaagtatctgaagagttatataaaatcggacaagataagcgtgcgaaagtactgcctatttacggcggccaggatatcggacgtcagatccgcgcattgaagaaaaacccgcatatcatcgtaggtacgccggggcgtcttcttgaccatatcaaccgccgcacgatccgtttaaacaacgtcaatacggttgtcatggatgaggctgatgaaatgctgaatatgggattcattgatgacattgaatccattctctcaaacgtgccgagcgaccaccaaacgctcttattctcagcaacaatgcctgcgccgatcaaacggatcgcagagcgtttcatgactgagccggaacacgtaaaagtaaaagcgaaagaaatgactgtgtccaacattcagcagttctacttggaagtgcaggagcgcaaaaaattcgatacgctgactcgtcttcttgacattcagtctccggaacttgcgatcgtattcggacgtacgaaacgccgtgtcgatgagcttgctgaagccctgaaccttcgcggatatgcggctgaaggaattcacggcgacttaacgcaggcgaaacgtatggttgcgcttcgtaaatttaaagaaggtgcgatcgaagtgcttgtagcgactgacgttgccgcccgcggacttgatatctcaggcgttacccacgtttacaactttgacgtgcctcaagatcctgaaagctacgttcaccgtatcggaagaacgggccgtgcaggaaaaacgggtatggcgatgacgtttatcacaccgcgtgagaaaagcatgcttcgcgcgattgaacaaacgacaaaacgcaaaatggaccgtatgaaagagccgacgcttgacgaagcattagaaggacagcagcaggtgacggttgaccgtctgcgcacggcgatcagcgaaaacaacctgaacttctacatgacggcagctgcggaattgttagaagatcatgatgcagtgacagttgtggctgcagccattaaaatggcgacaaaagagccggacagcacgcctgtacgcctcactgatgaagcgccgatggtcagcaaacgctataaaaaccagcgtacttctaagcgcagagacggccaaggcggcggctaccgcggcggcaaagggaaaaccaacaaccgttcttcctacgataaaaaacgctcaagcgaccgccgttcttcaggtgacagacgccagaaaaaatcatactaaaacacaggaagcggacccttttacggggtccgcttttttttgatatgccggaaagtgaatcttttttgcaaatcagccgtatttgtatgtatgataaaaaatgggaggtaggtatgttgagagcacagccaaaaaatcgaatcagtccaagcggcttaaaagtctggcgtcttcaggaaatcatcctgtccgccttctgtcttctggccgttatagcagcagctgttttaagccatttcttccattggccgtattggatcaccggagtcctcggcatcatttggatattcggttcagtgatatccgtctatgccataccgaaaatcaggcacaggatctggcgctatgaagtccatgaaaatgaaattgatattcaatccggcatttttattgtcaaacgggtcattgtgccgatggtgagggtgcagcacgtagatacttcacaaggcccgctcctcagaaggtatcgtctggcctcagtcaaaatctccacggcggcaaccgttcattccattccggcgcttgatatggaggaagctgaccggctgagggattccatttcccgtctggcaagggtgacggaagatgatgtctgagccgaaacgtctgcacccggcggccgtgattttgaacttattccatactattatcgaaaccattaaaaacattattctgccattttttctcgtctatattgttaattccaaccacttcatccgcttttacggaggcattgcgctcgccgtcctgcttatctggctgattacggcaagtgtgatcgagtggagaaaatttacataccggattgaggacggagaattcagaattgaagaaggcttgttttttacgaaaaagagatacatctccattgaccggattcaatcaatgaatacgagtgccggcatcattcagcagctttttaagcttgttaagcttcaaatcgaaacggccggcgacgggaaaaacgccgaggctgtcttatccgccattactgtggaagaggcggaacggatcagagcggctgtttttcagcaaaaagcggagcaagaagaacgaggggagaccgaagcggagcaggagccgatgcgcggggaagatgtgcaatccgtttaccgactgtctgtaggtgagctgcttatggccgcctcaacatccgggggaatcggtgtcatcatctcagcggtattcgccctcttttctcagattgatgaagtacttccgatggactggctctatgacaggttctcctttctcaagcatgcgagcatcggtatatacgccgtgatcattttcataggattgtttatcgcctggctgttaagcatcgccggtatgatgatcaagcatgccaactttaagatagaaaaaaaggaacacgaattggtcattaccagaggaattattgaaaaacatcaagtgacaatcccgctccgtaaaatccaagccattaaaatgaaagaaaatgtgatcaggcaattattcggatacgcgacggttgcgattgtcagcgccggcagtgcggggaatgagaaagaaggagcacagacgattctgtttccgatcatccgcaaatcaaagctcggagtgatgctgaacggtttcacaccggattacgtgctggaagaaaaccgaaatcatttgccgaaaagggcgctgcgccggtatttattccgatccataatcttctcggttttcgtgatcatcccgctttgtattctgtttaaaccgtggggatatgcatcgctccttgtgcttcccgtcgaactggtgcttggatatgcctcgtttaggacagcgtcatggtgcataaacggcggcaggcttcagattaccacgaggctggtcgggaagacgaccacgattatgctgagaagaagaatgcagatgtttgaagtcagccgctcctttctgcaaaaaagaaggcggctcgcatctgtggctaccgcagtgaaatcagctcaccacatggagcatgtcatgctgaaggatgtcagcgaggaagatgccgaacgcatcgggcgctggtattcatatgaaaaagcggacggttaataccgccgctttttttgctgcacgcataaaaaggaaagcaaaaatccgcctgccagtccgaacaaatgcgccataatgttaatattagagttgataaacgtcgacagcaccgcgatgataagcagggtcataatcattttcgactgatcccggccgatcagctccttgcggaaaacagtcaaaaacacatacacgccgaaaagtccgaagatcgcgccggatgcgccgacatgcacataatcaagcggttcggcaagatacgtgccgatattgccgatgatgcccgatgcgatgtacacaatcagaaaacggacttttccgagcatctgctcaagcgggggcgcgaataaaaagagagacatggagttaaacaaaaggtgagtgaaattcgcgtgtaaaaacatcggtgtcaccagccgccaccattctcccgaggaaacgccgtaattatagccggtcacagcatctgaccacatcatgacggaatgaagcggcatactgaaaaacagccacaagaacgcctgcagcgccaagatacagctgacggccggataacgtctgataaaagtctggaaattttccgttcgtataaacatcgcaagcccctttgcatctgatttgttacatatatagtaacacgtttatgacataaaccgttttttagtacggacttttaggaggaattcacatgattttcggaatcggaatcgacatcgttgaactgcacagaattgaaaacatgctcagccggcaggcgaggtttccgcaaagaatattgacggaagctgaatacgcccgttttacattgctgtcggacaaaaggaaaattgaatttctcgcgggaagatttgcggtaaaagaagccttttcgaaagcatacggcacaggtatcggcaaagagctcagctttcaggatattgaaaccggaaacgacaaagcgggaaagcctgtgctggcctgcgccaagcttgactgcgcggcggttcacgtctccattacccatacaaaagaatacgccgcggcacaggtcgtgattgaaaggttgtcacgctagtctgcatattagccggaaccccttcatatatttgatagtgcattaagggagacaagttgtttgaggcttttatggtacgcgtccgtccgttcagggcgtaccgttaaagtcaaacaagcgatttcttccctttacatcaattgagaagaaggggttgaaaaaaggtgagaaaaagctttgttttgcttttaacgggactgcttgccgtccttattctttcggcctgcggccaaaaatcacaggaagatatcgtgaacggtttagataagaaggcgaaagaatacacctcgtacaaagcgaaagccaaaatgaccattgaaacggggagtgatccgcaagtatacaatgtggaaatctggcataaaaaaccttccctgtaccgggtctatctggaaaatccgaaaaaagaccaaaaccaagtcattttacggaacgccaacggagtctttgtcctcacgccgtcgttaaataagagcttcagattccaaagcgactggccgaataacagcagccaagtatatttgtttgagtcacttgtaaaagacgtgcagcatgacaaagacgccgtctattccgccaaagataaaaagtacacgtttgaaacaaaaacaaactatcagcacaacaaaatgctgccgactcaggaaatcactttcaacaaaaaggacatgagcccgtcgctcgtcaaagtcatggatacagaccggaaagtgatggtaaaagtcgaattcaaaagctttgaattcaacaagccgtttgataaagactcttttgacgagaagaaaaatatgacgctttcccagatggacgtcgccacaagcgccaagccgtctgattcatttgcggtcaaaacaccgcttcaagtgccggccggcgtcaaaaagcttgaagagaaagatatttcaacggcggacggcaaacggatcgtcatgacttacggcggagaaaaatcattcacccttattcaagaaaaagcccatatcgcaaaagccgcctctgccgtcacgttgaaaggcgaaccggttaatctcggcttcacggttgcggcattatctgatacgtctttaacgtggacatatgacggagtggattatcttctttcatcacaggatcttacaaaagatgaaatggtggccgccgccaaaagcatgcagggacagtcgtcaaaataacgtcaaaaaagaggccgccgctgtcggtctcttttttgattccatttcactttgcagaataattttagtatgataataacaatatgaattgaaaataatgctaggaagtgtatcgaatgaacacagcatccttttacagagaaacgtgggcggaaatcaacctgtccgcgattaaagaaaatgtcacgcatatgaaaaaacacatcgggcaaaacgtccatctcatggcggttgtaaaggcgaacgcttacggccacggagatttggaagttgggaaagccgcgcttgaagcgggtgcctcttgtcttgccgtagccatactggatgaagcgatttcattgagaaaacggggcattacagcgccgattctcgtgcttggcgccgtgccgcccgaatatgtacaagcagctgccgagtatgacgtaacactcacggggtattctgttgaatggcttcaggaagctgcgcgccacctcggaagtgcgacagtgccgtttcatctgaaagtcgacaccggcatgaacagactcggagtcaaaacggaggaagaaatccaaagcgtgttaaaaatcctcagccaaaatcccggtttagtctgtaaaggcgtattcacccactttgctaccgcggatgagaaaaacagagattatttcctcttccagtttgaccgctttaaaacattgatcgctccgcttcctttaaaagaattgatggtgcactgcgcgaacagcgctgccggacttcgtcttaaaaaaggcttctttaacgcggttcgtttcggcatcagtatgtacgggcttcgtccttctgctgacatccaaagcgaaattccgtttcaattaaagccggcttttgcgctgcactctgttttatcccatgtgaaaaagatccgcaaaggggaaagcgtcagctacggcgcaacatatacggcagagaaggatcaatggatcggaacggttcccatcggctatgcggacgggtggctccgcaagctgagcggcacgtctgtgctgatcggcggcaaacggatgaacatcgcgggaagaatctgcatggatcaattgatggtcgaattagatcaatcttatccgccgggcaccaaagtcaccctgatcggcagccagaagggagaaacgatcacgatggatgaaatcgcagggcggcttgagacgattaattacgaggtcccttgtaccattagttcccgcgttccccgtatgtttttggaaaatgagagtataatggaagtaagaaatcctttactgcaagataatacaaacaagtagccgtcatccggaaaaagagaatttataaaacagctttgcttgacgtttgaataatggtatcattatgtctggatggatgtattggtcgtatccgtaagtttggtggaggtgtatgttttttgtctgaatccagcgcaagaaccgaaatgaaaatcagcttgcctgaaaacttagtagctgaattggatggtgtagcgatgcgggagaaacgaagcagaaacgaactgatatcacaagcagtgagagcgtatgtcagcgaacggacaactcgccataaccgtgatttgatgagacgcgggtatatggaaatggcgaaaatcaacttgaatatctcttctgaggctcactatgctgagtgcgaagcagaaacgaccgttgagcgcttagtcagcggaggataatcattttgattgtaaagcgcggcgatgtttattttgctgatttatctcctgttgttggctcagagcaaggcggcgtacgcccggttttagtgatccaaaatgatatcggaaatcgctttagcccgactgctattgttgcagccataacagcccaaatacagaaagcgaaattaccaacccacgtcgaaattgatgcaaaacgctacggttttgaaagagattccgttattttgctggagcaaattcggacgattgacaagcaaagattaacggataaaataactcatctggatgatgaaatgatggataaggttgatgaagccctgcaaatcagtttggcactcattgatttttagtcatattttggttgctcatatagagcaactttttttgttttcgaaaaacataagcgctataataaagagataatcaaacaaaatttgttgttttgtgtcgggaggtcagtgaaacccatgtcgaatcagaaagtgtatcagttcatcattgatcagcatgatgaactgcttgatacttggacagccaaactaaaagaagtaggcaatcaggaagactatcagcttacgaatcacatatgtgaaaatatttgtaaagactatatagacattcttttattatcgactaaaaatgacgaggccacggaagagcagatcagtgaactcgcactgcgcgccgttcagctcggcctgtcactgaaacttctttcagccaccctgtcagagttttggaaactgctttacgaaacgatggtcgaccttaatatggccgatcaggacagagcagatttgattttggaaatagacagctttttcaatccgatcaacacggaaatcttaaatcagtattctatctcctgggaaaaaacggttactttgcaaaaaatcgcgcttcaggaattgtcggctccgctgatcccggtatttgagcatgtaacggtcatgccgcttgtcgggacgattgatacggagcgtgcaaagcacattatggaaaatctgttaaacggcgtcgtgaagcaccgttcacaggttgtattaattgatatcacgggcgtgccggtcgttgatacgatggtggcgcaccatattattcaggcatcagaagcggtgcggcttgtcggcgcgaaatgcctgctcgtcggaatccgtccggaaatcgcgcagacgatcgttaatctgggaattgatttgtcgcaggttattacgaagaatacccttcaaaaaggaattcaaacagcgcttgaaatgacaaatcgaaaaatcgtttcattgggggaataacattgtgagacatccaaaaatcccgatcctgaaactgtataactgcttattggtatccatccaatgggaacttgacgatcagacagctttgcattttcaagaagatctgctgaacaaaatctatgaaaccggcgcaaacggggtcgtcattgacctgacatccgttgacatgatcgattcatttatcgcgaaagtgctcggcgatgtcatcaccatgtctaaattgatgggcgcaaaggtcgtattgacgggaattcagccggctgtggcggtcacattgattgaactcggaatctcacttgaggaaattgaaacggcgctcgatttagagcaagggcttgagacattgaagcgggaattgggggaatagcgatgaacgaccaatcctgtgtgaaaatcatgacagaatgggatatcgtagccgccagacagcttggccgcaacgttgcgaaggaattaggcttcggtacggtggaccaggccagaatcacgacggctatctcagaattggccagaaacatttacttatatgcaggcaaaggccaggtcagcatagaacaagtaaacgacagagggaaaaaaggccttaaaattatagcagaagacaaaggacccggaatccccgacatccgtaaagtgatggaagacggcttttcaacgtcaggcggactgggagcgggacttccgggcgtcaaaaggctgatggacgaattcagcctgcaatctgttgcagaggaaggaacagagattcaagccgtgaaatggcttcggtaggaggttagaacgtggatttcagggaggttatagagcagcggtatcatcagctgcttagccgatatatagccgaattaacagaaacatctttatatcaagcccaaaaattcagccgaaaaacgattgaacatcaggttcctccggaggagattatcagtatccaccgaaaagtagtaaaggaactgtatccggatctgccggaagatgtttttcattcgctggattttttaatagaagtcatgattggctacgggatggcttatcaggaacatcaaagtctgagagatatccagcaggagcttcgttcagaaattgaaattgccgcaaatgttcagcagacgctgcttggcacaaaaattcctgaagaagaagatctggatatcggggcaatcagcgtccccgccaaacagatgagcggggattattatcactttgtcaaagacaaggaatcgattaacatcgcgatagccgatgtcatcggaaaaggaatacccgccgcattgtgcatgtcgatgatcaagtatgccatggactctcttccggagatcggcattcacccctcccaagtgctgaaaaatcttaaccgcgttgtagaacagaacgtggactcaagcatgtttatcactatgttttacgcaaactacaatacgaaaaatcaccaatttacatatgcctctgcggggcatgaaccgggcttctactactctgaaaaagaaaaaaagttttatgatctggaggcaaaaggattggtgctgggaatttctcaggattttgattacagccaatatgaacagcacatggacgaaggagacatgatcgttcttttttctgacggcgtcaccgaatgccgtaccgaaaacggtttcttagaacgcagcgacattcagcgcatgctggaagaacatatggactgctccgcgcaggatatggtcaaaaacatttacgacagcctgctgagactccaggactttcagcttcatgacgattttacgttaattgttttgaaaagaaaggtttaaaaaaacagcagcacgggtaaaaagccattagcacgagtaaggataactttcagaggtgatacgatgaatttaacggtagatatgaaggagaatctttcagatatacaaatcaatatcgctggagaaatcgatgtatactcagctccggtggttcgtgaaaagctgatgcccctggcaaacgaggggaaggacatgagaatctgcttaaaagatgtaaattatatggacagtacgggtttaggcgtttttgtaggcgtgtttaaaacggtgagcaaggaaggcggctctctcaagcttgagaatctttccgaccggctcgtccgtctgtttgaaattacggggcttaaggacatcatcgacatttcggcaaagtcagaaggtggcgtgcaatgagtacatcagttgattatatagagatgaaaattccggccgaaccggaatatgtaggaatcgtcaggcttacgttatcaggggtcgcaagcagaatgggctatacttatgatgacattgaagatttaaaaatcgctgtcagcgaagcttgtacaaacgctgtccagcatgcatacaacgatgaaaataagggagaagtatccgtgcggttcggtgtgtttgaggatcggctggaggttattgtcgccgatcagggagacagctttgattttgatcagaagcagcaggatctcgggccgtacacaccttcgcacacagtcgatcaattgtcagaaggagggctcggtctgtatttaatggaaacgctcatggatgaagtcaaagttcaaagcaactctggcgtaaccgtggcgatgacaaagtatttaaatggggagcgagttgatcatggcacaaccatcaaaaactacgaaactaactaaagatgaagttgatcggctcatacgcgactttcaaacacatgataataaagaagctcaggaaacactcgtcgaggtgtataccaatctcgtcgaaatgctggcaaagaaatattcaaaaggaaaaagctttcatgaagacctccgccaggtcgggatgatcggacttctcggagccattaaacggtatgatcccgaggtcggcaaatcctttgaagcatttgcgattccgaccatcatcggcgagatcaaacgcttcctcagagataaaacatggagcgtacacgtcccgagacggattaaagaactcgggccgcgcattaaaatggcggtggatcagctgacgacagagacgcagcggtcgccgaaagtcgaagaaatcgcagcctttctcgatgtgtcagaagaggaagtgcttgaaacgatggagatgggaaaaagctatcaggcgctgtctgtcgatcacagcatcgaagcggatgcggacggaagcaccgtcacgattttagatatcgtcgggtcgcaggaggaaggatacgaacgcgtcaaccagcagatgatgatcaaaagcgtgcttcatgtgctgtccgaccgcgaaaaacaaattatcgatctaacatttgtgcaaaataaaagccaaaaagaaacaggggacattctcggaatatctcaaatgcacgtctcgcgcctgcagcggaaagcggtgaaaaaactgagagaggccttgattggagatccctccatggagctaatgtaatgattcaggttgaagaaaatgaacatgttcaaactcttgtataccaattaaataaagaaggcaagtccatatgcggcgacagcttttttatgaaggcgaatgaagaagaattagtttgcgcggtagcggacggtctcggcagcggatctcttgccaacgaatcctcgtcagccattaaagacatcgtggaaacgtatgcggatgaggatgtggaaagcatcattgagcgctgcaatcaagcgatgaaaaacaaaagaggggcgactgcctccatcttaaaaatcaatttcatcaaaagggaattgacatactgctcgatcggcaatgtccgtttcttcctgcactccccatcaggcgaagtctttcatccgctgccgatttcgggttacctctcaggcaaaccgcaaagatacaaaacgtatacgtcatcatacgaaaaaggggcgaggttcatcatctacacggatgggcttgaggttccgcatatccgcacctgcttaaagcagggacactcaatagaagatatatcaaaatcacttcatccgtacacaacatccagacgtgatgatttgacctatattctagggcagcttttatcgtaaggctgctttttttatgttccgccgttttttgatacactagagaaagaatgaagagatggaggcttttgtgatatggaaacgttagcccttttgaaaaaacaaatcgctgaagaaacagcgttatcccaaaaacatgtcgaaagtgtcatccgcctgctggaagacggcaataccgtcccgtttattgcgcggtaccgaaaagagcagaccggctcaatggacgaggtgcagattcaggcaatctccgagcggtggcaatacatacaaaacctgacgcagcggaaggaagaagtcatcagattgatctctgagcaggacaagctgacggaagggctgaagcaaaaaatcgaacaagcggtcaagcttcaggaagtcgaggatttataccgtcccttcaaacaaaaacggaaaacaaaagccaccgtcgccaaaagcaaaggccttgaaccgcttgcggactatattctttctctcccgaaagaaaaccgccttcacgacatcgctgatcaatatatcagtgcagaaaaagaagtcgcttcaagagaggaagccattgaaggcgcgaagcacatcatagccgaacaaatctcggatgatcctcatttcagaaagtggatccgccaggaaacgtataaaaaaggaattctcacttccgcggcaggcaagtcagccgcagatgacgagaaaaacgtctatgaaatgtactacgagtacgaagagccgattcaaaaggtcgttcctcacagagtgcttgcgatgaaccgcggtgaaaaagaaggcattttaaagattgcgatcgaaccgcccgccgatcagataaaagcttatttagaaaagcaaatcatcaaacatcgtgaaacgcctgtgaaagaaacgctgaaagaagccattgaggacagttacaaacgtctgatccagccggctattgagcgcgatatccgcaaagagctgtcagaaaaagcagacgcgcaggcgattcatattttcgctgaaaacctgcgtaagctcctgctgcagccgccgatgaaggggaaagttgtgctcggcgtcgatccggccttccgtacggggtgcaaactggcagtcgttgatgagacgggaaaagtgctgaaaatcgacgtcatttacccgcacgctcccgtaaaaaagacagcggaagcccggaaaaaaatcaaagaattgctggaccggtacgaagtcgaggttgtggcgatcggaaacggcacggcatcaagagagacagagcaattcgtcgttgatgtgctgaaagaaacagaacgtgacatttattatgtcatcgtcaacgaggccggagcaagcgtgtattccgcgtcagaaatcgcccgtgaagaatttccggattttcaggtcgaagagcgcagcgccgtctccatcgcgcggaggttgcaggacccgctggccgagcttgtaaaaattgatcctaaatccgtcggcgtcgggcaataccagcatgatgtcagccaaaagcatttaaatgaatcactccgttttgtcgtggagaccgtcgtcaaccaagtcggggtgaatgtcaatacagcatcagccgcgctgcttcaatatgtagccgggttatccaaaaccgttgccggtaatatcgttaaaaaaagggaagagctcggcaaattcacaaaccgcaaagagctgaaagaaatcccgcgtctcggcgcaaaaacatatgaacagtgcatcggctttttgagagtgcccgggggacgggagccgctcgaccgcaccgggatacacccggaaagctataaagagacaaaggcgctgctcaaaaaactgcagctcactgcggatcagatcggaagcgcggacgtaaaagagaaaataagcgcattgccgctgtctgaaacggctgaagagctcggtataggggaaattacgcttgcggatatttgcgggcagctgacaaggccggagcgcgatcctcgtgacgaagtgccgaagcctttgctgaaaaaagacgttctgcagcttgaggatttaaaggaaggaatggaattgcagggcaccgtccgcaacgttgtagacttcggcgctttcgtcgatatcggcgtcaagcaggacgggcttgtgcacatctcaaaactgagcaatcaattcgtcaaacatcctctcgacgtcgtatcggtcggagacatcgtcaccgtatgggtcgaaggggtggacgtgcaaaaaggcagagtgtcgctgtctatggtaaaataaaagcactgcttacgagcagtgtttttttctgtagaaataccagcactgattcagcagtttgatttggtaattgtctttttctaaaaacgctttttgcatttgtttcatcagccaattcggcatggctcattcctcctcagcttttagttagaggtcggttttaactcattgtatgcgaacggtgaattgtcccgttcaatgtttttaaagcggggtgcacttatggataacgaacaacttcaaaagctgacggaagacatctctgcacaggatttcggaaaaccgttccgtcaccgggccttcttcaatgatcggctgaaaacgacaggcggccggtacatgctgtcttcccataacatcgaattaaaccgaaaatatctgctcgaacacggccggagcgagctggaaggcatcatcaaacacgagctgtgccattaccatcttcaccttgaaggaaaagggtacaagcacagagacaaagacttcagagacctgcttcagaaagtcggagcgccgagattctgcacgccgctgcaaacaaaaaagacacaaaagaaaacatatatgtatagatgcgcggcctgcggccaacagtatataaagaagcgggcaatgaatccggaaagatatgcctgcggaaagtgcagaggaaaaatcaaaagaattttttaaaaaggcttgactcattttaatgttctatgttaaattataaaagtcgttgagagacaacgacactttctcaaaaaaataaatgttgcttcttgacacaatatgtcgcatcatttataatgaagaaagtctgattattccacagtagctcagtggtagagctatcggctgttaaccgatcggtcgcaggttcgaatcctgcctgtggagccatatggagaagtactcaagtggctgaagaggcgcccctgctaagggtgtaggtcgcgtaagcggcgcgagggttcaaatccctccttctccgccagataagttctcaaccagacggcccgttggtcaagcggttaagacaccgccctttcacggcggtaacacgggttcgaatcccgtacgggtcaccatttaccttcgttgggctatagccaagcggtaaggcaacggactttgactccgtcatgcgttggttcgaatccagctagcccagccattttatttaaaaattttgaatcacttttagagcgagccattagctcagttggtagagcatctgacttttaatcagagggtcgaaggttcgagtccttcatggctcaccacttgtcacgcgggtgtggcggaattggcagacgcgctagacttaggatctagtgtcttacgacgtgggggttcgagtcccttcacccgcactttcttttcaaagtgctgatcatcatcactagcttatatgcttagtggaaagacagcttcatagcacgcggtcgtggcggaatggcagacgcgctaggttgagggcctagtgggtgaataacccgtggaggttcaagtcctctcggccgcatctcaatgataccaagggtttaaccacctttggtattatttttttatgtataaaatgcaaccctgtagaaaattttatcatttactagaattggagaccactggttaggtcggataaaaagtgttgttgggcaagctatctggatgtaatttatattggtgagtgggtcggaaaacccaacctctatcttaaatatttcccatttaaaaagaagagtaggcaagttgctactcttcatctttttatccactatcttgtgctatttgtgagatggcagctgaacaatgccctaaagggatttttcagcaggaaattcttgttttgatggataaaataagaaaatgcgtggatactaaccatgaaaaagatttgtttgtcagtgacgcctccagtaagaattgaatattctttattctcatcaaagaattttttcactctagagtaattcacatttagcctcacacacatttgattttggtttgcaattcatcgatcttattgagttcgtagtcataatcacagttttcttctaaaacagaaatcatagtttcaaagaaaccttttgcattttttaagagtgtttcaaaaaaatcaagtttcggcagtaatactttttgtttttcatcaatttcaaataacaacatatcattcgatattgatttcattttcaatagaagtggttgatctggaaaataaagtttcactttcttctgtttcaatagcttcttcaattaaattcaaaaaataagcccataattggtcaatcaagtcccacattgtgacatcaagtaattcttgttcaccatattttaaaataatcgctcctgataaatagtttgggtctaactgtgatttcatgttcttaagttcccctgtattgttaagtgggacaaagtaatcgtcaacattcttttttaagactgaaagatcctttatcttcttatttggcttgagaattaatgattgtatataaaacattcttacctctcctatttttccggatagaattgaccgactcttcctttgtgaaagcctacaacatattgctgacccttatacgttcctctaatttgataactgaattttgttcctttttgtactaactcttcacggttttgtttcatgattgattctatcgcatctgcaacatcgaactaacagtcatctctttattgagaaaagattgacgagacttaactgaacatcccataaactaggatgatggcgctctaaaatatgcttcattccacgtttatcaatgagaaatgattgtcctccaaaaatgtatttcctgctttgaaaagtctctaattcgtttacaacttcatgcggctttgctttttttataccatgtgtagcagactggttcttaaaaacttcaagtgcagagtttttataactctccccgtcaattgtgttgaaaggaaaagttcctgaaccgccagccattgcatattgttgttcaaaaacatttggtattttaacgtattcaatccctttttttattcctgtttttgaaacttcaagtgtcttaattgcagcaacttttgaaccggcttttgcaactttggatactttatcaataccctttggaccaactattgcaagaacaacagtgctgccgacataggacacccattttgccctgctgtagctatctccattaatcatatcacgttggaaagtgtcttctatgtcttttgctatgatcttataagtatcgattggatgtaagacggcgttcaccgttccagaaagcgtttcaatagggtgcattgcaagttgatagagacccatcacggtatctttacctgcttcatacattccaactgcaataccttttccgatttcggctttttgttgaagttcttcgagctggcggaaataaactttttggtcaggctccaaattctcgtatccaatttttttagcaatttttaaatactcgtcaggatctgttacatttacaagctgttttttcaaatctttaatttcgcgttttttagcttcctcttttttgatttttaaataagctttagatttcttttcgatatcgccttttttcttatgtatgtcactctcacgataagccttggcattataatgtatggatgaagcgtttttgcccttaccttgttgactcctgtaacttttaaaagtctgctttaataaattgttcgttaggttcagtcattgcatattcagtttttaaattctcgtctgtattgtctattttctcaatagtctttttccgtttgttatcggcggaagagagctcttccttaaaagcctctgttgaaaataaatcaagtggaagaatgtcatcaatatcactcaggatatctttcatagctttcttctgctcggacatcattgcttgtgattttctatatgcgtttgccagttcgtgttctaagaaggattcttcgatatatgcatcagataagctggcatcttccagaataccggtgatacttgtaaagaaagcgattttcatatcaatgaaatcaatccattgatcagctacaccggtgtgatggtgaaaaaatgctttaatattgtttgctcccttcccagagaactcactatcatcaagatcagcaacagccttaaatgcttttttcaaattaatcatttgatttttcaactctttataatcgtttgctcggttttcagcttcagataacaaagaccttgcttcaaatactttcattggacaatcctttcagtaagtttatatctaaatattaccatggataggatgtgaagttcgaaaaaattgttgaagaagaggtaatgaattgaacgtaatgagatttcgagaagtgggattaagggggtttttactcaccaattattaaccataattcattcaaacctatagaaatgatgtaatgtggcgttagaaagtgtaatgaaaacaagctttcataatcagtgatacggatttacaatgttgagggcttagtgaggttaaactcgtggaggttcgactcctctaaaccgcatatacgaaataatccaaaagaccaaactcacaagagtattggtcttttttgttgattgaaattacagattttccactatacctttttcggttattaatactattcttggtactggtgaaaagacgatctatattatagtggctaaagtactgaaagcatcagcaaattgggttgatctcaatccatctaaagccccgcgtaataacgctgcaaatggagcaacgccttttacaacgagctctattttatcctgaaatgatagctattttttatcaagtaaatttatgatgcgttttcctcgtccacctccagcttctaaggaatgatgagctttggcaacatcagataaaaaataaatgctatcaataactggtctgaccttgttggaatctacataagatgctaattcttttagaagttcatttttgggatttgcgctgaatgtgcgaactctacgagaaccgaaagtagttgaagctaatatatatattaaggacgaaaactactttatcatctaatcctgtagacatacaataattattaaggaagaaataaagtaaaggctcagacccatggaaagacaatgagtttgagctttgtttacccaatacgaaactacggggcaggaaccacatttttatttgtacaatgcttaaatgaaaaagcattttcataccactacgactgtgtaagctgagtggggagggcactgctggcactccttgtattttgctaataacataaagtaagttataagaagtaaaggaattcctgttgaaaatccctttactatccctttaagacattgtttcatctttagcaactggttgagttctgatgaataatcatacgatttttacaatcgttctccctcttacttgtccttccaatatttcaggaagaacgttaggaagttgatctaaagtaatttcttgtgaaataaattcctctaaattagatggtttaaaatctgttgctacacgatgccatgtttttaaccgtgtttccattggacaatatacagaatcaatcccaagtaaattaacacctcttaagatgaatggaaaaacagtagttggcagttttgttccagctgttaatccgctaacagcaacggaacctccatattgaatttggcttaagatagaggcaagaggttccccgcctacaggatcaacagctgccgcccatttttgtgaccctaaggctttaaccttccctccataggtcatatcccgtgaaataattgtactagctccaagttttcgtaagtaatcatattctgattctttacctgtactagcttctacttgataacctaaagagttaaggaatgaaacagcaaaactaccaacgccacctgttgctcctgttaccagaacttttcctttttcaggagataggttattttcttctagacgttgaatagatagtgctgctgtgaagccagctgttcctactatcatcgcttctttgagggtcaaattatcaggtaaaggtacaatccagtctcctgggaggcttgcatattcgctaaaaccgccaaaatgagaaacacctatatcataacttgtagcaatcaccttatccccctctttaaagcgaggatcattagaagaaatgactatacctgctaagtctatacccggtataaatgggtactttcttacgattttcccatcggggatccctgcaagcccatctttgtaattaattccagagtagtgtacttggatgtggacatcactttctggtaaaaacgctggagaaacattctttactttaattgaaaattcatcatcaactttgtttacaactagagccctgaattcgtctttcattttataaatcctccaatatgctatcttgatgtgaaacctcttttagtatacccaattattctgaccggtcaaactattttatctggtcagaataattttgtgtggattttatgaactgttgtatactaattgaaggtttagctttctggaggtttattatgaagaaaaaagcagaagaaagaaagaatcaaatattaagggcagctttccaagctgtgtcaacacaaggttataattcagttacactacaaagtattgcagatcacgcaggagttagtaagggcgtcgtgcattattactttgataataaggaagataccctttctcaactacttgagtggattacaaataaaatttataaacatgaattgaaagcagtggattcggaatctacgccactggataagttgaaagcttatgtaaattcaatatttgtctctcccgaggaaaatgaaaagttttacaaggtttatttagatttcttgtctcaggcaacccgaaatgaaacgtacaggaaaattaaccatagcttttatcaacagtgctggggcatcacatctaacattattatttttggacaggaaacaggcgtatttgaccaaagtatagatgttgaaaaagcttcaaaaacaatgcgatctattgtagatggattgctcattcaatggctaatgagtgaagatataaattcacatgaatattataaagagatttgttatcagagctttttgaagcatataaagctcacttaattctattggtttatctccattctttacgtaacagaaaaagacataacgaatctaaaaacagaaaatgtcccttaattaagaagcatcattgtcacatgcaatgtcataaaaatattcagtggtttacatttattgagggtacttgaagaatgaggataccaaatgaacaggttggtatctttatcgttttagctcaccattttttaaccataattcatataaacgtatataaatgatggaaaatgaaaataggaaatgtaatgaaaacaagctttcataatcagtgatacggatttactatgttgagggcccagcgggtgagtaacccgtggaggtacaagtcctctcgtctgtaaaataagaagattgtttttctttttttataagagaccatataaatcggcgattaatgtagtctttaatatgagtataacatttgcgctttcttatgcaagagaagcaccaataggtacggcattgtttttacaaattcaaacgccgagatggaaaacgaaaaaacataatatgacttgtaatttaaaggcttcttgaagcacaaaaaagctctgactaattaatttagtcagagcttttttttatgaagtattcccgagtatctgtccttgtttttttaggcaatactacgtccaattctttatttaaccatgcgagcgttttattacgaagataattacgcatctgttcttctgcttcaagcatgaccaagttaattgtacaagaagaattgctggattcacaggagttgcatttgtctcgataaagcagaccattgcttacaatatttttacattgaaaaatgggttttggtccttcaacagcctctattacatcccaaaaggaaatatcttctggggattttgctaacctgtatcctccctttacaccggggacagaatttacaataccagctttagataatttaccgaaaacttttgaaagaaatgtttctgaaagtccttggaactctgcaaggtcccgaatcccgacactttccttggagggaacatctattaaataaaccagacaatgtaaagcatattcaaccccaacactgtactgcatataaactcacctgcttttgattttaagggttatcacattgtatcttaggagtatttttggtgatagtcaatcataaaacccttctttagtatattatttgttccgtttgacaaaataaactgcagggtttatattaaagaccgaattgatcgtcgattaaattaatctttaatataaaataaaaggagagttttaaatgagcaaaacacttatcattaatgcacatccaaaagtggatgatacgttgtcatatagtttacgggtaatgaaacactttttggaaacttacaaagaattaattccagagagtgaagagcttgagcagattaacttgtatagtgatgaagtgcctatggttgataaaacagttttaagcgcatgggataaggctggaaagggcgaagaactgacaagcgatgaacaaaaagtaacagaacgcatgacagaagtattgaaacaattcaaaagtgcaaaaacgtatgtcatcgttttgcctttgcataatttcaatattccatcaaaattaaaagactatatggacaatatcatgatcgcacgcgaaacatttaaatatactgacactgggtcagtgggtctgcttaaagatggacgaagaatgcttgtcatacaagccagcggatcaatttatacaaatgatgactggtatgaagaagttgaatactctaataaatatttgaaatcaatgttcaatttcctcggtattgaggattatcaaattatccgagtgcaaggaacagctttactaagtccggaggatgttttacaaaaagcaaataaagaagttgaagaagctgcttcaagattagcaggtaaataaggtatagcatgaagatcattgttgccggggggactggagtaattggtcggtcccttcttcctaaattaatacaaaacggccatcaagtatttgcattgacccgaggtaatcggtcgaacacgttcctcaaaagaataggggtaactcctgtaaaagcagatgcaatggatcgagatgctgttcttaatgtttttaggaaaattcaacctgaggttgttgtccatcagcttacctctttaacaagttacaatcttatagaaaacgcgagaatcagaattataggtacgagaaatattgttgatgcgtgtcatgaagttggagtgaagaggataattgctcaaagtctttctatggcctatgaacccggattaatacctgccaatgaagatgtccctttagatctcgacgcaccgaatccaaggaaagtaaatgtaattggagtggcatcattagaatccgcagttgctgaattacccgagtatgtcatcctgcggtatgggctgctttacggatcaggtacatggtatgaaaaaaacggaatgattggtcggcaggtattaaaaggagaaactaaagccgatgatagcatcacatcatttttacatgtggaagatgcagcacaagcctcagttgaagcattaaactggccgaatggaccggttaatattgtggatgatgaaccaacctcgggaaaagaatggctcacgctatttgcgagcgagatcggagcaccaaaaccaatatttatagatggaagtgaacgaggaaaacgtggggcctcaaatggaaaagcgaaaagagaatatggttggaagcccacttatccatcttggcgtattggttttaaattattagccacttaataattcagagcgagtgtaacttcataattaaagccttggatttttcattaatatggaatttcttcacaaaggagagagacttaatatgtcgaaaattttatatattaccgctaatccaaaatcagttgaaaattcagttggtcatagggtaggacgtgcgtttctggaatcttatcgtgaatctcatataggggatgaaattaggacaattaatttatatgaagatgaattcccaataatcgatgaagatatccttaatggctgggacaaattgcgggatgagggttcagagttaaggcaagtagagaagcataaaattaacgcactcaataatttcactgacagggtagcaagcgctgataaatttgtatttgtatctcctatgtggaactgggggattcctccaaaattgaaagctttcatcgattcctttgttgtagtagggaaaacatttcactacactgagaatggaccggttggtcatctaaaaggaaaaaaagctattcacattcaggtgagtggtggggtttactcgcatgaaccttttgcgaaaatggattatagccacccgtatttaaaacatgtacttaatatcattggtatacaggatgtagcagtattatatgttgaaggacatgaattcaatcgacacgaagcgaaagaaattattcacaaaggtatatcagatgcgagaaagttagcaacaactttttaatacaaatcaaataaatataaaaacatattaaaggggagagaatttgtaatggctacgaatattagaaaagctgaagctaaggatattgaccaattaactgagataatgtatgaatatatcgttgatttttatcagagaccgaaaccttcaattgaaaaagttcaccaacttttttatacacttcttaatcaaaaagaaggtatccaatttgttgcagaacaaaatgataagctagttggttttgctacattatatttcacttacaatacactatttgcacaaacaacaagtgtactaaatgatttatacgttttggaagatgcgagggggacagatgctgcgaatggcctcttcaaagcatgtgaaaaattttctaaagacaatgactatgctgatatgttttggctaactgctcatgataataaacgagctcagcgtttttacgaaaagatgggtggaactcctgaaagatgggtcccttactcaattcaattttagtaaacgacattaaaacattgcaagaatatgtatcaatgggaatctgaaaaaatgaaattacgagatttaaattaatggtgggaagatgatgtgttaacacatgggctgggcttatggaactggagatactaaattgcatggaaaagaactgctcttagcgatctccttaggcgcacaggaatctgattatcaagcaggcggagaatataatatcacgatcagcgagcttatcagaccgtttcaagtcactgctaactatataggaatgcgttttcttcctgcctttacacaatatgggacacttcacctttcaaaagaagatgttaagaacagtgcggagaaattggttgactatcttaaagctgagcattgatccggtattcgcgagggaagctgaaataaatgatgtgaaactaattacagcagggcgatgagagtgcatatttcttgatgaaatgcagatttccttggtctctaataggtgcccggtttgtgctcagaattcatgaaaaataatgaaaataagtataaataaaataaacagatgctttgaataaaagtttggcccagcgggtgaataatccgtggaggttcaagtcctctcggccgcatctcaataataccaagggtttaaccacctttggtatttttttgtgcttatttttaaatgatctactatccacaaactgcccacttacctggagtaagtcatctgcagtagacgtcgcacaaatattttcattatttatagatagttactaatgcttcaaactccaatttgcaaaagtagagaaagtattgctaagcatggaggaaaacaaagatgccttgttatatgatcagctattagaaattagacacgagataatagggtaggggcataagggtactgaaaaggcttaatcttttttaaaaggttaagccttttttttggctataaatgtaatcggtgtccaattagttgccctgaattcatgaaaaaggataaaataggtgtaaataagttgttattttaaaattagaatcaattctttatcacaaaagcaatagtaactaatcggcgaagaaaggataacagtcaaatgaaaacattagttatcgttatacaccctaatttggaaacgtctgttgtcaacagaacctggatgaatcgtttaaagcaagagaatgacattacggttcatgacctgtacggtgaataccctaattttatcattgatgtagaaaaagagcagcagctcctgttagatcatgagcgtatcgtttttcagttcccaatgtattggtacagcagtcccgcgttactcaaacaatgggaagatgatgtgttaacacatggctgggcttatggaactggaggtactaaattgcatggaaaagaactgctcttagcgatctccttaggcgcacaggaatctgattatcaagcaggcggagaatataatatcacgatcagcgagcttatcagaccgtttcaagtcactgctaactatataggaatgcgttttcttcctgcctttacacaatatgggacacttcacctttcaaaagaagatgttaagaacagtgcggagaaattggttgactatcttaaagctgagcattgatccggtattcgcgagggaagctgaaataaatgatgtgaaactaattacagcagggcgatgagagtgcatatttcttgatgaaatgcagatttccttggtctctaataggtgcccggtttgtgctcagaattcatgaaaaatgatgaaaataagtataaataaaataaacagatgctttgaataaaagttttttgtaactcatgataggtttttactaggttgagggcccagcgggtgaataaccagtggaggttcaagtcctctcggccgtatcaatgataccaagggtaatagagagatccttggtatttttttgtgcttatttttaaatgatctactgcccacaatctgcccgcttacctaaagtaagtcatctgcagtagacatcgcacaaatattttcatcattataggagtattgctaagcaaggaagaaaaccaagacttcgaggagaatgtttgctgatgttaaaaatttttcgattgaagtcgctgattattttcatgaacgaggaagcttaatgctctctaagaaaattaaaaaaggagagattattgatgaaaatcagccggtgtctattggctgcagtgattttaggtagtgtgttttcaataacttatttgcaaagtgatcaaaatactcaaactatctggacaatactttgcttggtcttatttgtcgatagtcgccgtaacgaaagcactaaacaacacattaaagagattcttttgatatgacggacacatatgacagtttgcgattgtcaaaattcaatttttaatctttgttcaacttaccaaggtcagttaaaattttgttaaaattgtgataaatgtatgaaaggattaaatgttcatatcgaaacatttggattacagggaaggggaaacaaatacatgtcgatttaccataaagtaattggagagggatacccgatcgttatgttgcatggttggacacttgaccatcaggtgatgttaaatgcaatggaaccgttattcgagaaacgaagcggttggaagagaatatacatagacttaccgggtatgggacattctaagccgcaaccgtctattcagaactctgatgatattttagaagcgatattgcgtcttttggacgagattattcctggtcaacagtttattgtgtgtggtaattcatatggagggtacattgccagaggtatcgttcgttcacgtcaggaaacagttcgtggattactgctgatggcaccattaactatacctgaattcgatgaaagggtagtaccgcagaagactgttctaaaaagagacagcgacttgatatcacaattgtcttcagaggaggcggatgaattttgctctatggggattgtgcaaggtaaaactgaatgggagaggtttcgagatgaaattttacttccttctaaacaaacaaattatgaattcataaacaacattcgtcaaaatggatatgggtttaccttcgatatttcatctaaacttgagtatcccacgctaattatcacaggacgtcaggacaatgtagtcggataccacgatgcgtggcgactactcgaagattacccaagggcaacttttgcagtacttgatatggctggtcacaacctgcaaatcgaacaaaccgatgtatttaattcattggttcataactggttaaacagacttaagttggaaaattttcagaaggtataacttttcataaatatgagtttactgttacaattaccagttagttaaacaaaattgagataatgaatattgggatttgctaaaattttagttattattagtctttattgtcattggggataatttaatcattgaatttcatgatggagaagtaaaattaaatgaaggtgaaatgtttgtcattccgaaaaatgttgaacataaaccttatgcagaatcagagtgtgaaattttgcttgcagaacctaaaggtgttgtgaataccgggcaagaaataactgatcaaacagctgaaaatgatatctggatttagctgtaagaaatagccgatcaaaaataaatccattacctaagaaatgtttctttatttccagctggatttaaaaaataattttgttaggtgtcatgcaataaattcaattgtcggtgattggcctgtttaaatgcatccattatttcatacccggtgctacttatttctgttgtagtctgcatactgattaataggtaaagaaagtcgaaaaggtatacgaaattcttcatacaaattaaagttttgaatgaaagagcaggattactcctgctctttttctttctaattgggctggattaaacacagacggttattccttgggaaaaacaaaaaaatttcttctatccattgactagctgggctttagccgggtttctatcaccctgttgggcttgtcagattttaaaaaggtatgctacgtttatagtgttttgtttcacctgattgtggggtaataaagatagaatcagtaaataattcttaggaacgacctcgatcttataataaacatattggaagccgtaatggaagaactaaaataaacgtttaggatactttggagaaataaaagtttgttttcgaatgtgataatattcacaatagagctgtattaaggggggaatcatttctccaaatagtctgcagagaatgccaaccacagcccaaggatatatcactaaccgctttggctggtattatctgttggatgtttctctttttgttgctttttgtattatttttagtccaatcggcaaaaataagttaaggaaaccagcgaaaaaactgaatttcatccttctttcctggtttacaatgttatttggcgctgatatggatattagtctagtcttttaaagtacagttgaacctatcatccactatgccgttagctctccatcaggtgaaacagaaacccccagacttttagagaagcattacgctatacattctgggactgcatgcttggaccgtttatgcgcttgtataatgtggatttgataattaaggagtcgatattattaaatgaagtttaacaagaaaaaaattaacgttgtagacattcaaaaagcgaagaaaagcgtgtttgctacagggataggaaacgcgatggaatggtttgattttgctttatattcttatttggcagttattattagtaaaaactttttcagtccagtacaaaacgatgaattaaagttaatatttacttttgctacatttgcaattgccttcttacttagaccggtaggcggaattatttttggtaaaatgggtgataaatttggtcggaaaatagtattaacaattactattttaatgatggctttatctactttaataattggtgtgcttcctacctatgatcagattggtgtatgggcccctatattattactattagctcgtattctgcaaggtttttctgtgggtggagagtacgctggtgcaatggtatatatcgcagaatcttctccagataataagcgtataaggttaggcagcggtttagaaatcggcacattatctggttatatagtagcttctgttttagttacagtacttttctggactttatctgatgttcaaatgaatagttggggatggagaattcctttcttcttaagtattccaataggattatttggtttatatttgagaagtcatttagatgaatcaccaatttttgaaaatgacatctctgaaagccaagaacaacaaccaggtttattagaagtcattaaaacatataaaaaagatatctttttatgtatcgtatttgtggcatttttcaatataaccaattacctattgttaggttatatgccttcttatttagatgagaaccttggtataagtgataatataagtacaccggttacagcaattgtattgattattatggtaccgttcgctttaactttcggtaaactaggagataaattaggaaataaaaaagttatatcaattggattagtattaggaattgtattttcgattatctcttttcaatttcttaatatggggaatataacattcttatttataggacttttaatgttaggtattgtattatctgtatacgaaggcactatgccaggatctttacctacgttgttccatactgacattagatatcgtacattatcctggacattcaacttatcagtttctatttttggtggaacaacacctttagttgcttcttggttaacccatgtgacaagaaacaatttggcgccgggtttctatttattagcagttagtttaattggcttaatagttgtgttaaccttatttaaagatacttcaggtaaatctttaaaaggttcttacccaacagttgcttctaaagctgagtttcaagaagctgttgaaaatccaaaagatgcactgtggtggaaaatggaacaaacagagaaggaatgaaaaaaacatccatttaattgaccgactactcgaaatacagactcagaataagctgggattatccgagcagcaatgactgcagctcttttatattctggagggcttactgctttgcaaaagcagcgttgctattctcgatcgtcattattttattggttgtgtcctaataataaaacattgacgcaagaacgaagagaaattaaaaggtccgagcaatacagcaaaataagagcaagaagctttgttatgccagttcttctcccgaaggagagctggctttttattttctatatggggtccaaagcagaaaacgagaacttgtacgctaatcacagtatttggttcttcttgttttatgggagaaggaaaaaatatctgttaaaggtttaggcgaagaattatatctagactccggaacattaactccagttttaaaacgacttgaggagcgaggtcttattataagagagcgttcaaaagaggatgaacgaagtgtaattattacgttaacaactgaagggaatgagtttaaagaaaaagtcacattgattcctaatgcagtatttgataaaaccgattgtaatgaagaagaaattaaaagttataacaaggaaattcgtaatttacttaacatgctgacaactgagcaatagttttatgaatatagatgggcgggcccagcgggtgaataacccgtggaggttcaagtcctctcggccgcatcaatgataccaagggttttgacacccttggtattttttgtttataaaaattcacctgttactgtccacttacttatagtaggtcgtatgatttgtcagtcaccttcatccttctgctgactgcgtgcggcggcagtaaatatgataatgcaattaatgaagtgatgaagcaggagaagaaagtcagaaaagaaatgcgagcagattcagatgagcacaaaagagataacgccataattcgtgtatatgatgacgggaaatatattcaacttgcgttttatcagccagaagaaagttctcgtaggctgactgcttattcttattatgagaagcttggagattcttatgaggaaatggcacatatgccgggtgatggtgatggcgaccgccttggtctgtataagaaaacacctgattataaagaggttaaaggcaaggaaacaaaaacaatgtgcttgttcattcctgataggggaacaattgttttaccgttaagttgttgtgtgagagccagtatgttaaaatgctacgtagatttaataataaagtttagattcaaggagatttatttatgaaattggatgaattcaccatcgggcaggtttttcaaactaaatcttttgaattaacaaaagagaatataatgaattttgcagaagtgtatgacccacaatacatgcatttaaatgaagaaaaagcaaaaatgggcagatttaatggaattattgcttctggaatacaaacgttatctattacttttaagctttggattgaagaagggcgtcatgaagacgatattattgctgggacaggaatgaataatataaaattcctagcacccgtttaccctaatgataaactgcacactattgttaaggttattgataaaaaaccaaataaaagccagacggggatacttactgtattgttatctacctataatcagaaagaggaaaaagtgtttgaaggtgagttatcagtattaattaaacgctaaatgacctttgcggcatatcatcgtcacctttcattttttatagatgtctggatgaagtgagcaatcatcttaattaattgagtggactttgtgtttgctctttttttatttgttcaacctatgtcaagaaacaaaggactaacaataacgaaaaaatcatctcgtaaatacgaatttaaaaatagctgccttgaggtttttgcatattcctctgtatcattgcaccgggtgaatatctataatgagcgttctatccttcgatgttatgtttcctttttactttttggttttgtcagttcaaagctgtactttaccatgtcatggatttggtgctctgggagtccctcatctaaggtaagagtattccaatgctccttgttcatatggtatccgggcttgatttcttcaaaaagaccacgtagaaaatcagccctttcaggttcgcatttaaggttgacacataagtgttcgtcgcgagtgaagataagtgcaaatattttcttattccctttgtgacgaattgcagtccaaccatctccgaaaggatggtcttcataagagtttggaaaggttaggcagtaatctttaatttcatcataattcattatcaattcactccatacctcattatttttatatacagaacatattcgttcaaactaagatttgcggtttcttttataccaatccgagatttcctcaaatctttgtttgaacttagcttctgaaccttgagttgttggatagtaatactcaacgccctattaaagaatctggcatcgtctgcattgtcgttaatttttcctttttatcatgagcatatttatatcccttaccgtaatctaaatctttcatcaaaaggagcagactttatgtctgctctttttttgttcatgaaaaagccatttttttatccccagtctgataaaagattttctgtgaaatcatttaacaattattggtcaacttttctttttcaataatatcctttaccacatcctcaattgtgatatgcccaagagctttttccaaggcagattgggcgatttcaaatattggaccaattgtactttgaatgttccggcctacaggacattgaggattgggattttcatgtatactaaacaattctttatcttgaacaacattaactgctctataaacatcaagtaaggtgatttcagttagatccttcgctaattcagctccggcaatacctggccgaacatttactaaacctgcttttttcagcatccccataatttttcttatgaaggcgggatttgtatttacacttccagctaaaaattcagaagtgctaattccgtcttcatttatttcaataagagccaatatatgaattcctacagcaaaacggctgctaatagacatgatttcttcaccatcctcattactttacactctttatagtacacttgtaactgaatgtattacaagttcttttactctaatatgctcaattaacaagatgataaaagtattgacaaataaatgaggtgtaactaaaattattacatgtaatcaatatggttacatttaaaattttgaattattaggaggactttaaattgaaaattggaatcattggtgcaaccggaaaagctggaagtcttatcttgaaagaagcggtaagcaggggacatgaagtaactgcaattgtaagagatgctgcaaaacttaaagaggaaaagattgcagtcattgaaaaaaatataattgatcttacatcggatgatctaaaaaagttagatgtaatagttaatgccttcggtgctccattaggagaagaacaggcacatgtagatgctggccgggcattaattagggcattaaaaggaacgggtgcaagagctgtaattgtaggtggagcagggagtctttatgtagacgaaaataaaactgtcagtgtaatggatacacctgatttcccggagatttttattccgacagctaaagggcaaggtcgtaacttgcaagaactaaaggaaacttctgatattaactggacatttatcagtccttcagcggtatttgacccagacgggaaaagaactgggttttatcagtcaggaaaagatcatcttcttgtgaattcgaaaggcgaaagttatatcagctatgcagactatgcaattgcagtattggatgaaatcgaaaatccaaaatatataaatgaacgctttacagttgttggagaagctgaataagtgattgagtagaaacaaaggggtaccattagtgtcatcgctaatggtatcttccttctaagaatgtacggagacattgaaaactttgcaaacagagcagctgattatttttatgaaaaaggggatttatcacgttccaatgagtattatcgagctgatgacagagtaggtgctttgtgagttggaccaaaaaaatatgtataaaaagctctgactagcaaccttttggattagttagagcttttttatttgactgtgttacccagtgtaatcctccgtattgtttaatacactttagtttgaaaatccgggaaactcttctacagttcctagttcgtgtctaaagtgtgaatattccagcggggaactttactgaaatgaggggtattttcgaaaacacaccagtttgctctatgacctgccgtcaatgacattaaagaaatgatttgatgaaaaataaaaaggagcgatattcgttaaaattcaggtagtagccatacatagccatataaaacacataattaattctaaattctttactgatcgttcttaaatttgatatacttgaaatacgttagatctaactgttttgctactcaaaagagaatgatcattctttaattatttcagaatgagggagggatgaatgaatgtataagattgtgcttctagtacatcattgattctcagtcctttccctgaatatgttcgaaggtgggattacatggctagaaataaagaatttgatgaaaagaaggcattaagaaaagcaatgattcttttttgggaacagggctatgaaaaaacatccatgcaagacttggtggatcatatgggcgttcaccgcagaagtatttatgatacatttggcgacaaacatactttatttatgcgagtcttaaatcattatgtagaaataatggaaggccgaatgaagaatgaagtgaaaacagaattaacagtgaagcagtcgatacgaaaattatttgaaatggtgattgattcgacacaacagcagccaaaaggttgtttagctgttaatgcagctgttgagttatccctaattgatgaagaagtagcgaaaaaaacgacagagatttttataaatacagaagccttattatttgatctgctaaaacatggtcaagatcaaggtgaaattcctaaacacaatgacatcaaagggctttctcaatttattcataattcactcgtaggaatacgagtattaacaaaaacgacaaatgataaagagaaattagaaagtattattaatttcactttgtcgacactagactaaatctattttgtgatatcgattagttaattaaaaatatggtttcgaggagagaatgatatgaaatacacagttattacaggagcaagttcaggtataggatatgaaactgcattggaatttgctgctcgcggcaaaaacttaattattgtagctagaagattagagaaattagaagggcttaaatcagtaattcataatataaatcctgatttagatgttattattcatacaagtgacctatcgataacagatcaggcatacacattgtataacagtttaaaggagtatcaaattgagacgtggattaataatgctggtcttggtgaatcttcttctgtgacggaccagaatttagagaaagtagaatccatgttacgtcttaatatagagacgttggcgattctttccacactatttgtgcgagattattctcatgtagagggaacacaattaattaatgtatcctccgcacttggatatgcgacttatattggtggtattacctattctgcatctaaatattttgttagtgcatttacagaagggcttgcaaaagaactggagcttaaaagtgcaaaaatgaaggcaaaagttttagcaccagcagtgactgaaacagaatttgagaaaactgcacaggatgtagaagaatttgattacaaaaactttatgccaatgtatcacacagctaagcaaatggctggttttatgatggaactttatgacaacgataaagtcgtaggtattgtagatgaaagctacaatttcaatttaagagatcaaatctatccaatactaggcgtttaatgtattaacaaaaataacgtgttggggtggctgataaacataggttctttgcagtagcgattcaaaaagtttaattatttgagaatgaacgttctaaaagacaacagtcccaattgaataaaaagataattttgtgagtatttaaggtttaggtggtgggttgatcttaaaataaggttccctccacctaaacgattggaataatataagatctttataaaaagaattatattgagggtagaaaaatgaagtagacagtgaaaataataaaaataaggtaaagaaacttaataaaagcaactcaacggaagggtgctaataaaaatggaaacactcatgagagcagctcagatcaccaaatattcaaaaaatccccatgtccaaattaatgaaattccaattccagagatcgctgacaatgaagtcttggtaaaggtcaaagctgcggcggtcaatccactcgaaatgttaattattacaggtagcgtgaaactgattcaagattatgaattcccattaacgcttggtaatgaattgacaggtgttatcgaaaaagtcggaaaaaaagtgacagaatttcacgtaggagatgccatctatacacgtctccctctcgaaaaaattggtgcttttgcggaatatgctgcaattgacgctgccgcaattgcacccatgcccaaaaatttgtcttacgtggaagccgctgctgcaccactggctggactcacagcgtatcaaggtctacatgaagaactggaggcagagtcaggtaaagctgttttcattccaggtggatcaggcagctttggtcaaatggcggtaccaatcgcaaaggcaatgggcctaaatgtcattgttagtggcagctcagaagcgcgcgaacgcactttggaaatgggtgcagtccaatatttggattatacaatagaaaactatgttgacttgttgtcgaatgtgaattacgtaattgatacattgggacctaaagaatttgacagtgaattgagtatcatcaaaccgggcggaagattgctctctctccgtacaggaccaaataaacgtttcggaaaagaccgaaatttcccatcgtggaaacaaatgctattttcccttgctggcgcaaagtatgatcgcaaagccaagaaacaaaacgtggaataccattttatcttcgttcgttctgacggcgcacaacttaaagagattaccaaaatcattgaagaaaacaacattgttccagcaattcatccaacacaattcaacatagacaacgtaaatgaagcgctagaactagtcgcaaatggacggccaaaagggaaagtgattattcaattttaaggggaatacgaagaaagcagtcattaaagttgagattgtttatgcaaaggattttgaaaggcaataataaggtgttacaaaccgcgagttctgctgattaagaaatggaaagataaaaacctagatcaaatcatagaaaaacttcatcaagccggagttcattataaaacatggagaactagctatttcaattgttcttataaaaaatgttgaaatgtaattaagttaggcggttactctaatagacatgtcaccagtaacaagacattaactgtcttgaaatgaaaacctactccatttttactcccaaataaaaataaatcgaagtgaacactcataatcaaaataaacaaatgctgatattataggcttttgtaattcataataaagaatcactttattgtgggcccagcgggtgaataacccgtgggttcaagtcctctcggccgcataccaataataccaagggtttgaccacctttggtattatttttttgtgcggaaaatacagctatgggagaagacttgcttaccaaaactttctaggttgagggcttagtgaggttaaacccgtggaggttcgactcctctcaaccgcatatatgaagtaatccaaaagaccaaactcacaagagtattggtcttttttgttaattgaaattacagattttccactatacctttttcggttattcatactattcttggtactggtgaaaagacgatctatattatagcggctaaagtactgaatgcatcagcaaattgagttgatctcaatccatctaaagccccgcctaataacgccgcaaatggagcaacgccttttacaagaaatgagcgtccattttatcctgaaatgatggtttattttttatcaagtaaatttatgatacgttttcctcgtccacctccagcttctaaggaatgatgagctttggcaacatcagataaaaaataaatgctatcaataactggtctgaccttgttggaatctacataatatgctaattcttttagaagttcatttttgggatttgcgctgaatgtgcgaactctacgagaaccgaaagtagttgaagctaatatatatatgaaggacgaaaaactaggaaatccaatagtaaccattctaccgttctttgcaagcaagcgcctataatgtttgaggtcagttcccactgtgtccatgactacatcaaactttttaagatcagtaggagatgtttttttataatcaaatacttcgtctgcacctagctcttgaagaaaagtaagatgtttttcgtttgcaagagcagttacatgagcacccaacattttgccaatttgaatcgcaatgcttccgactcctccacttgcaccacgtacaagtaacttttcgccttttctaagtttcgttttatattttaaggcaataattgcagtaacacctacaccaggcaatgccgcggcttgcaagagatcaacctttgtaggaattttagatattttctcaggtgatatagctacatattcagcggcactaccaatttggctccttaaattcataggaagaactccccacactctatcacctaattgataattttttacgttcgatcctacctcaacaacctcaccagaaaagtctgcccctgttccttttgggaattgattacccgttaatagtttcagcttgcctgatcgaaatagcgtatccatagagtttacactcgacccatgtacacgaatgagtacttctccagtttctataacaggttttgatatagaatcttcaaaaagaacattcggtgatccatatttagtatattgtgcagcacgcatcttttcacttttcatttactcactccatctccttgaaaaagtataaacttgaagggttttatgatcaatttagctctctaatacatgggtgacagggtttacatatttgattataataaatggaaaagatttaacaagtactcaatataaactgactaagtaaggaaaaactgactaaggagtggataaaatatgactgaaagtgagctaaataaagcgatagctccagcaagttatgcattaaatatattagcgggaaaatggaatttaaaaatcttagctgtactatgtagttacaatgatattcgatataatgagttaaagcgtaaagtgtatggaattacaggaacaatgctcaatcaatcattaaaggatctgattgaattcggaattgttcaacgagttcagtataatgaagttccatcaagagtagaatattcattgactagggcaggactagagctgaaccctatatttgaacaacttcttttatggggcgaaaaccaattagaaaaatcaaagtcataataaaatgaatatacaaagaaaacgatgatcacgagtagaataacaaaataaaaattaattttaaataaatgttttttatttgtagaagagattggcgaattcatttcaattataaactgatagaagtatgaacaaggtgattcaaaaacgaacgttttgacaatattaatatgattgttcgatattataataatgattattctttggagggtttccgagtggtgaagtattagggaattttaagtcttcaagatggctgataaagtaataaaaacgagtaaatgtgtgcaatggatataagtaaatgaaggatataacatggatgcacccaattgagagcccagcgggtgaataacccgtgggttcaagtcctctcggccgcatctcaatgatacaaagggttttgacacctttggtatttttttgttgtaagtgcatgtggcattaaaaaagtgctgacctctgcacaaaatctttgcgcgagtctgcacttttattatgcaagatacactgcccattatcatcgattatgggcgtttatttaatccgttcttagccgagctgatacctggcttttagaagttttttttaagtgggtaaaaccaacaaattttttgccttcttcatcccataggcggaactttaacgacttaatacttgttgccagtgtgatggtcggaacgttttgcaatggttcggtgttgttatgcacgatttcaagcttatagtttgggactcttgggcttaaatgatgaacatgatggaaaccgatattgcctgttaaccattgcatgacttttggaagcttataaaaagagcttccttcaacggctgcttttacatattcccaatgctcatcttcttcgaaatatgaatcctcaaacgtatgctgaatataaaacatccaaattccgagggatcccgagatcataaaaattggcgtctggaccagcagaaaggtttgccagccgatagcccaacataaaagtgctgccaaagcgacgatccccaggttggttacatatgtattcatccgttctttgcgttttgctcctttacgattaaaacgattggtaatcccgaagacgtaaatcggtccgataataaacataacaaacggatttctgtacaaacggtacattatttttgtcttagttgaggcttctttatattcctcaacagtcagtacccaaatatcgcccgtaccgcgtttgtccaggttgctgcttgtcgcatgatggacagaatgatcgtgtgcccaatgatcaaacggatgcagagtcagaattcctgttattgttccaaggattcgattcgcctttcggttcttaaaaaaggaatagtggcagcaatcatgaaagatgatgaaggttcttactaaaaaacctgctgcaacgacagaaatggctaatgtaaggaaataagaaatggacaagctcttatatgccaaataccatagcaggaacaatggcaccaatgtgttaacgatttgacatatacttttttgtaaatcggacttttcatagggtgtaaccagttttctcaaagtccttaggttttgttcattcattttttaaaaatttccccttccctgatgttcttctatgtatcgaaaacgtttgtctttgaagtcacaccgtcatacaccatagatgataagtatctttcccattcgtttgtgaaattattggaaatgagatacttttttccaggtcgattaaatctttattagcagaaccagccggaattcaaaaggtgtatgaagattatacccagctctttatcgggccaaactctctccatgctccccaatgtgaatcggtttatttagaccgtaaactttgattgtttgaggaacaaacatgacaagttaataccgttaaaatagaggtatacctgagtgatcgtttggaaacatctgcagaaacaaatctgtaccagtgaacagccaagaatatcttgtacttgaacaagaaacagctgagccttttaaagaaatctttaacaatcaatatgaagtactgggtttgaagacactcgtgattcattttcacggtgttttcaaaccatagctattaataggcatcttattttgcactggtatcgacaggtttaacaaataaaacatgaatgaacacattattaatttgcagttatttccgtttcgtgctatgataaaggagaattatttttgttcgtgtaaaggatagtatgaatatcgacttttcgtcttgatgatactttgggcaaggatagtaatacaatgtgtaacacactaggaggcaacaaaaatggaacaaggtacagttaaatggtttaatgcagaaaaaggttttggatttatcgaacgtgaaaatggagacgatgtattcgtacacttttctgcaatccaaagtgacggattcaaatctttagacgaaggtcaaaaagtaacgtttgacgttgagcaaggtgctcgtggagctcaagctgctaacgttcaaaaaactgcttaatcttcaatcgtttatacaaacaggctctttatatagggcctgtttttttatgttctctgtatcatactgaataaaaaaaccctactcaacgttcgagtagggacagttgctacaaggtaagaaaaaggtttaaaacctcaaaggattgtttacagtataacataccggattgacgatatgtggaatatatataaatgatttgtttttatgttctcaagataactgtatgttattctttgttacaattcgcatatctcttttacgaaaagaagataaccaactgctattcactgtggaagcagatgtaagaaattcttaaagataaagaggggagtggttgttttttcttctggaaataatcacttagacctaaaacaatgaaagccctgcctctcttccatccttacggctccttgtccgtgccagtgtgaatcaggattacaaaaatcaagtgactatttcatcgagttttttgataaaacatcaaatgttcgttgaagaaatttttaataataaaaacagattagattgtaggaataataaaagaggttaatgttctaaaagtaagttgaagaagttaagcgtcttcgaaatattttaatcgtaatattccgaaaactcgtgggtgctttttggaatgcaaaacattatttaaaattaaccttagcagaaacttttcatttgtttttcagtgattcctttaatgacttccagttcactaatcaaaaattcatatgcatgatccaacatttttttttcgcttgaattaagtgctttttctttcttcattcgcattaaatcacgtacaacttcagcgccttcttgtatttcacccgtttttattttgttcgtgtttactatatacctttgcttccacggcagtaacttatctgattctccatgctgaaaaatgtgtataatgtgttttaatgcacgtatatcagtaactggccgtatatttgaactcaatattttacgcgttggaatcataactgtcatattactgattgacattcttatgacataatactgttgtttttcctctaagaattgtttttcttctatggcttcaattgtacctgctccgtgcattggataaacaatgttatcgccaatttgaaacatataatccacctccatatatgggaacttaacttaaggttatcatatatggagtgagatatcaaatttttaatgataacatggtcatttatttgtgtcaataattttttttaaaaaaacaacatcaaaacaagagggaacctgtgggattcccaaaaaaggaaagatcaattggtccgtgtatatcttggaatctcgactaattaacagagatcagtttttcgttgaaaatgagttattaaatctcctttaggagttcatgacttgacatcaatgacagcaattgaatcctaggtttgtttacttttttactttttcgatgtcttcttctcctcaaggataccaatcatacaattaagagcatgttaagtaaatatggagacttcttgtgattaatcttttgggtttaacgtaaaacaggtgggtactaatattaactctttataatcattctcatgccgtcttgaaaattgacagtatacctgtaagggtataatattgattcacaaacattatctagttaataatgtagtgtgataaagcatagtatgaagtgatagttgataacatgcaaatatataaatttcaaagaaggagttcaacgcatggaatatgatcaaaagattaaaaatcgcttacgccggatagaaggacagataaaaggtgtattgaccatgatggaacaaggaaaagattgcagagaggttgtgacccaactagctgcttcacgtaatgcgatcgatcgagcaatgggtttgattgtgagcacaaaccttgaacattgtgttcgtgaaagtttagaaaagggagaagacacacaacacttagtaaaagaagcggtcgacttattggtaaagagccgataaaaaaattcatcaacctatcatctttaaggttgacggatttttatatttattataatatacccctaccggtattttggattgaataataggagatctttcgaaaaaaattttaattctaatatacccataggggtaatagtggttagtcaggagaataaacatgacaaaacaaacaaaacgcacaacaattgttttatttagcggcgaatatgacaaagcaatggcagcctatattattgcaaatggtgcagctgcctacgatcatgaagtgacgatcttccatacgttttggggattaaacgctttacgtaaagaagagctgattccagtgaaaaaagaatttcttgaaaaaatgtttggaaagatgatgcctcgcggtgctgataagatgggtttatctaaaatgaactttgcaggtatgggccctaaaatgattaaaaatgtgatgaaaaagcataatgcacttacgttgcctcagttgattgagatggctcaagaacaaggtgtaaagctcgtagcttgtacgatgacaatggatcttcttggtttacaggaaaaagaactattagatgatatcgactatgctggtgtagctgcttatttggcagatgctgaagaaggcaatgtcaacttatttatctaatgttgttcattgcaagggaggctatgaatcacgatgggcagcggtgtaatcatcaataccttactcattttatttttactgtggatcgtatttcgacgttttttcccattgcatggtgttaaacaaataacaactgctgatttaaagtcagagctgaaaaataaagataaacagtttatcgatgtacgaacaccccatgagttccgtacaaggcatattaaagggttcaacaatattcccttatctgacttgcctcgtcaaactcatcagctttcgaaagacaaagacgtctttgtgatctgccaaagcggaatgagaagtgtaaaggcaagtaaaatattgaagaaacaagggtttaaacatatcacaaatataaaagggggtatgaatacatggcattaacaccgatttttatttatttgtatacccccgcccctatataagaaaaggaggaaaaaatcgtgaaagcaaatattgtattagacgctaaaggcttgtcatgcccaatgccaatcgtaaaaacaaagaagaaaataaaagaattaaaagctggtgacatattagaaattcaagcaacagataaaggatcggcggcagatctgcaagcatgggcaaaaagctcaggccatgaatatctaggtactgaaacagagggagaagtccttcgtcactttcttcgaaaaggaggagagcattcatcagaaaatgcatcttcaattcctgagatttcattagaagctttcacacagaaagtggatcgtgatgagtctcttcacattttagatgtacgagagatagaggagtatgaagaagcccatatccccggagcggtgcatatccctcttggcgaagtggaaaagcgctctaacgaattaaacaaaaatgatgaaatttatattatttgccattcaggaagaagaagtgaaatgacagctcacaccatgaaaaaacaaggttttaaaaaggttattaatgttattcccggtatgcgggattggacaggtaaaacagaaaaaggaggtatgtaaacatgaccgtgcaagcacttaccgcaaaagaagtcacacaaaaaatctttcacaaagaatctttatttattttggatgtacgtaatgaaaatgattttagcgattggaagattgaaggacattattttgaccatttaaatgtaccgtatttcgatcttttagatggcgtagaagatatcttggagaaaattccttctgataaagaagtgctggtcgtttgtgcaaaagaaggttcatctgtcatggtatccgaaatgctttctgaagcaggtcattctgtatcctatcttaagggcggaatgaaagcatggagcgaacatttagagccggtaaaagtcggggatttaaaagatggcggtgagatgtatcagtttgttcgtatcggtaaaggctgcctgtcatacatggtcatctccaatggtgaagcagcgattattgatgcgacacgtatggcagatatttttatagactttgcgaaagagaagggcgcggagattactcacgtatttgatacacatcttcacgcagaccatatttcaggcggcagagtcatagctgaaaaaacaaaagcaacctactggttaccaccgaaggatgcagaagaagcggtatttgattatcagccgctggaagaaggcaacgatattgtcattggaaacacaaagattggcattcaaccgatttattcaccggggcacacgattggttccacttctttcattgtcgatgatcagtatcttctttcaggtgatatcttgtttattgattcaattggcaggccagacttagccggtatggcagaagattgggcaggagatttaagaacaacgctttatagccgttacaacgcgttatcacaggatttaattgtattaccggcacactttatgatcattgacgagctaaatgagaatggaagtgttggtaaaaaactacgcacattatttagcgagaaccatggtttgaacattgcggatgaaacacaatttagacacttagtaacagatcatttgcctccgcagccaaatgcataccaagagattcgagaaacaaacatggggaaaatcagcccggatgaagaaaaacagcgtgaaatggagattggtccaaaccgctgtgcaatacggtaacacaagtttctattaaaaagaggagagacgaacatgaaatcagataaagtattagacgcaaaaggcctggcatgcccaatgccaatcgtcagaacaaagaaagcgatgaatgaactggaatcaggtcaaatattagaagtgcatgcaacagataagggagctaaaagtgatcttgcagcttggtctaaatcaggcgggcatgaccttttagagcaaactgatgaaggcgatgtattgaaattctggattaaaaaaggctaatgaatgtgaaagggtatcgaatacaaagatgccctttttctttgaaaggaggaaccaaaatggatattgcctttatcacaactcttttcattatagggtttattggtgcctttatttccggaatgataggtattggcggatcagttattaattatccaatgttattatacattccttctttagtgggagtgatgtcattaactgcccatgaagtttcagggataggggctattcaagttttctttgcgacacttggcggtgtttgggcttatcgtaaaagtggttttttaaataaagcattaattatgtacatgggaagcagcatccttttagggagtgtattggggagttacttttctcatcacatatctgaaaaaggaattaactttatatacggaattctggctatactagcagttattttaatgtttatacctaaaaaaggacaagaacatagcgaagacgaagaagtgatatttaataaatggttggcttcgtccctagcgtttatcattggtggcgtatcaggtattttaggagctggcggcgcttttatcctagtccccattatgttatcgattttaaatatccctgttagaatcacagtcgcttcatctcttgcgattacatttctttcatctattggcgcaacagttggaaaagtaatcacgggccaggttctttttgcaccggctctggttcttatgattgccagtttaattgcttctcctattggcgcatctgttgggcaaaaagtaaatacaaaattcctgcaatggattttagcgttattaataagtgcgacagctattaaaatttggttagagctcctttgatatgactcagcgggtaaaatgaaagattaaaagattcatcactccttggtttcttattcatgttataacacttgctcacgttcaataaatgtttcaagtgcttgatgaaattctttttgataatggtgacttgggcaagtcttgactatagtgcggtgaaaaacatttgatttagttgcgtccagtgttttatttaggacagcgttatgggacataaacctgtacgttttaaaacgaagatggtgattttaacaaacatggaacccgagacatgtcatgtaactttctggtgatgaaaaaaacgactccatttttactccacaatatgaataaatcttggtaaataacatgatcaatataaacaaacactaatatataaaggttttgtaatagaaaacacagtttcgctttattgagggcccagcgggtgaataacccatggaggttcaagtcctctcagccgcatcacaatgataccaagggttctgacacttttggtattttttgtttgaagctaccccgttacttatagcaagtcgtctggtttgccagctatcttttttaaagaccctttttcgattaatgaaatgataatctaggagaagacagccaaaaagaaatgagagcagattcagatgagaaacacaagaataactcatcgtgatcgtattcgtacacatttttacagaggaggacagttatgattggaatactggcaggaatggggccgaaatctactgggccatttgtagaaaaggtagtagacgagtgccaaaaaatatatggagcaatacatgacatggatttccctcatatgatgatttattcttgtccgactcctttctatatgaataaacctctcaatcatacggacatggaaaaggcaattattgagggggctgtaaagcttgaaaaaacgggtgttgattttattgcaatcccatgtaataccgcacatatctattttaatcaaataaaaaaatcgctttcagtccctttactaaacatgattgatgaaaccataaaaaaaatacctaaaggctccaaaaaagcagctcttttagccactgttcctacggttcaatctggaatatttcaagaagcgttaaacagagaaggttatgattttttacatcaagatagttggcaaatctatgtcgatcacataatagaaaagattaaacaaggtaaaatcaatgaggctcgtacattatatgatgaattacaccgtgaattagcagaaaaggttgatacggttatcattgcatgtacggatttaaatatggtcacggatcaaaaaagcagcgaacttacctttgttgattcatcagcctgtcttgctcaagccattgtaaataagtatgtattattaacaaaataagccgtcttatttatcagcaaattcagggcgctttttttccgttaaagcgcccggcttcggcaaatacatgatcctcgattacttctttgaatgtaacttccccgcgttattgttcttttaacattgaatactttcgatacgctttatagaaactgcagccaaatagaacagccataagggcgggaagcgacctcaaaagggcaaatggagtttcaaataaaaatgctttccaaaacattgcgccttccatactccacagaccttcagctaaatacaaacctgaattcgtgtaaagcatattacaataaaacaagcacagtaacccaaaacaagatgaaaaactcattagtcttttataataattactctttgattggcgatccgagaagatttcattttgatcatcatcttctttttgccaatatcgagttccaagcccccaagggccatttatataaacccagccgaagtcttcatagatctctttgtagtctttgaactttttctttgataaataatcttgataatccagtcgcatcacatattttttgtcggttttttcgaaagtgtatattcctaatccgctgatatttgtacagcgatagcctttttgtaattgctcgttcagccattgctcctctttttcaatatcaaaaaacatcttaaatgtcttcattcgattcacttccttcgtacagggataaaatatgcagtaacctgttttgttccattttcaaaatggcgcttccttccgcagttatcatataaacttttctccggcccgactctccgacaggttcaatccagccatgcttattcaagttttcaatcgcaccgtataatgtgccggctgctaaaataacagttccgttactcatcttttcgatcttctgcatggcggcatagccatgaagcggctcccgcagagctaataaaatataatgcatggtttcagacagcggtaataatttatgtttcatatcctcatcctctattcagtttgactatatagttaaacttaatacagttcaactgaatagtcaatggtcttttcaaaaatttgtcaaaggaacttgaaaatcaaatctaaaaagtcgcttttcttacgtaatgggaagcgactttttgtatgtccatattgacgccaaaaagaatttatcgcggtacgcagctgttttccgatgtagcagtgtcgtttattttcaatgtgttttttacggtaagaaaatcatcaaattgaaaggggatgaaaattaatagttgacttaagcaactgtttcgattacgatggaaaaaagttgcttaagtcaatcttttggaggaggttcatcaatttggaaacaaaacgtgttttggcattcagacaatttaatagattttatacagatattttaggctttctaaatgaacatatttatgacagtccattctctttaacagaaacaaggattttatacgaaatttataatacggccgattgtacagcaaaaatcattcaagaaaggttagacttggacagaggatatgtaagcagaatcgtcagaaaattcgaagaagaaggcttcatatacaagcaaaaatgcagagaagacggacgcaaccatttcctttatgtcaccgagtcaggggaaagtatttataaaagtctggagaaaaaagccaatcagcaggttgaatatatccttgaacgcatagacaaagaggaacaagaaaaacttgtacattcaatggaaaccattcaaaacattttgcagcattctttttatgataaagaatctccgatttcaataagagactattatacttcagaggatgtcaaaaacataattgagaaacagcgattattttatgccgaatcccatggctgggatgatacatttttatcctatcttcacgatacgtttaaagctgatattaaaaaaatatgggtggcagaaagcgggaatcaatttgcgggttgtatcggcttagtgaatgacgatgaaaaaacaggacagttaaggtggttcttagtcgatccgtcttttcaaagaaaaggtgtcggcagccgtctgattaaggcacttgttcaatattgtaaagaaaatggatacgagcgtatatttctttggacggtaagagacatgtcaacagcccggccattgtataaaaaaaacggattcgaaattacagaaattcatgaagaaaaacctttatggggatcaaatttaatagaagagcgctgggatttggaattataaagtgaggggggataggatgcgatgcgaataaaatatcactatgcatggatcattgtgtttgtcacttttttcacctttttagcggttcaaggcgcgcgtctttcatttggagcttttgttgaaccatgggaaaaagatttttctatgaatagaggaacaatctcgcttatttccactctgagttttatcatatatggcatatctcagcccataatagggaggctggttgataaattaggtccccgaatgattttgtcattcagcactttcgtagtcggggtcagctttgtattgacttcttttgtgaatcatccatggcaattatttatcctttacggaattgttatctcagtcggtgttggaggggcatccaatgtagccgcaacagtggttgttacaaattggtttaatgaaaaacgcggacttgcttttggaattatggaggcagggtttggcgcgggtcagatgcttcttgttcccggctctctcattttgattcaatggtttaactggaagttaactgtagtgattttgggtctgcttttaatggttattgtgtttcctgtcatactgttatttttacggaatcatcccgtcgagatggggctatctcctatgggcggttttatgaaagcagaagctgaaagtgaacagcatacggcccgcttttctgtttggacagtgttttgcaagaaacaattctggtttttaatattaccttttgcgatatgcggttttacaactacagggctgatggatactcaccttatccctttttctcatgaccatggattttcaacaagtgtaaccagtgccgcagttagtgtattggcgggatttaatatattggggataatcatctcaggaattgcggcagaccgttggagcagtaaaaagatgcttattcttttatatgtcatacgcgcattatcaatttgtatcctgttatatagtcatcatccggtcatattgcttatttttgccaccctgtttggactagttgattttgcaactgtagctcctactcaaatgttagccacgcaatattttaaacaatattcagttggttttattttaggctggttattcctgagtcatcagataggatcagcgctgggagcttatgtaccaggttttctctataatgaaatgggtaactatgatctttctttttatttctcaattattattttgttgggagcggcaatatttactttcttactgcctgaaacggtgaaaataaaaaaagaacaaaaaccgaagaccgattcagcttcaaatgaaacagtatccaagcgtgtgaataccccgtaaaggtccaaatcctctaagccgcattaataataccaagggttttgagtcccttggtattttttgttcattgaattattataaacttctaacttagttaatggttgttgttccagtttttctctataaatgtattcacaggctgtaagttggttttgttcgcaatttcaatgacagcgggaaccacggaagggtctgttttggagaagttaggaatccgcggatctaaccggaaaaagcgatctcccagcagattcgcgctgaccatggattcatagtagccatttccgccggagatcatctgaagaaatggcagtaatggttcattaggcgacctgtccaaaaggactccccaatttggaggaaggttcttcagattttcgggacgtatgttatccgcactcaccattccccatcccctcgtatctcttcttaaccgagtcggggcttcacctgtaccgatggatagtgccgcaatttgatccagtggcacgttggctttaccaaccgcaaacgcgatactggccgtactggggttcgttgccactacatatccgtccacgtagttttgataggctcgctgcgtcgcgggagcaccgctgctccgcagtatgacatcactcactttctcatttaaatagggagagccgggaaagttgtgaaataatacgggcgtccaacgatccagtgctggggagtataatttgaatgaagggacaacaattcgttttcttacatctttaagacgaaggcctggcgggaaaaagtttcgtaccgctttaataaaaccggaatatggtaattgttgattgaaaacaggtcctcccggccgcgaagtgctgaatgcgggcaggatttcatcctcaaaatactgaagtgtttccttcggagatcttccgcttgctaatgcaagggcagtaaatgaaccgattgaatttcccgcaaatacatgggttcggcttattaatgctggattttcttcagccagtctgttcaatagctgtaaacttaaagcacctaaggtaccgcccccgtcaaaggtcatgatccgatactttgccaaagctgatttctcctttctgatgaaaactatcattcagtatatgttcaaccagagtctattgtatggatgaatgaatatctcataccataaaaattgctcaatttatcaatctaacggggtgggaaagaaaatatttttaagtttaagaggcggatcatgaaggtattccatgggaagaaggagaataggttataaaaataaaagggggaaaaatatttgaatacgattgaccttatcgttttacattttgaagaggtgagacggcgaagcatcaagttatggacagctatacctgagggaaaaatggactggcgcccggattccgaagccatgtcgtgtaaagaaatgataagacacgtattagaagcggaatttctttatcatcaaattttaatgaaaaatatgagtgagttttcagaggaaactattaatccttatgaatcaaaaatgtttaccacagtaaccgaagaattagaatttgcaaaaccgtatcgggccgagtttttgacattcatcaaatcgttaaacgaaacggatttaacaaatataaagattgacaggtctgatgttggatatattcgcgaactaggagacatgttattaagaatcgcttatcatgagtccgtacatactggtcagcttttagattatctcagaactgctaaggttgacaggcctttaatttgggactagttaaatgatagagttttacaaggaaagcggaaagaatggaatataaaccgattaattttcaagagaaattagctgcgttccaagatcaatggtctccaaaagtaatcgctgaaatgaatgactatcaatttaaacttgttaaggtacaaggggattttgtttggcataagcatgacgaaacagatgaagtcttcattgtcattgagggtaatttaatcattgaatttcgtgatggagaagtaacattaaatgaaggtgaaatgtttgtcattccgaaaaatgttgaacataaaccttatgcagaatcagagtgtaacattttgcttgcagaacctaaaggtgttgtgaatacaggacaggaaataactgatcaaacagctgaaaatgatgtctgggtctagcctgtaacaaaaaaacgatcaaaactccgaaagaccgaatgacgattagagaaaatgatcaggaaaaccaattaagaatgatttaaggttaaatattgaaaaattttgttaatattataatacattgtttggaaatgtaatcattttataaggagttttctaattgcgttggagtaaatggttcaatattttttgcataacagcattggggtcaatatatggctataaattgtttactaaccaagaagtcagtacgactcgtttaatcatagctgctgcaattatcttgtggaacattgtcggactttttagcaaagaaccagtaaaacaaacacagcaagcaaactaaaagtcaaaaacacaaaaagttggtacagaaggatgctgcagcgcgcagcatcctttttatcattttcacaaaaaaaccaagggtttaaccccttggttttttcgcagtctccctttttacgctgcttatcataaacatttaagtttcatcaagcatccagaatctgttgtatcgataaatgaaaattatcctaaaatgtgccggttcatcaaaataccagtccaagctgcagttatttctttacatagtatgtaaagattaaaaaatgagagaaggagtggcgtaatgtattataacgaaggtgaagatcaacagtacgttcagaagaaaaagccatacaacgaagcctgtgacctaggccatgattttgatatggcggacgacgcagcaagagcggaagcagcaagagaagcagaagcgagagccagagcggaagaggcaatagcaagagcggaagaagcaagagccagagcagcagaagcggcaaaattagcagcagaagcaaaggtaaaagcggcaaaattagcagcaaaagcgaaatgtaaaaaacgtcataagaaagagaaaaaacaggattgcaaacgtaagcacaagaagaaaaaataagagcttttcatcatgtaaaagataagattcaatgtgtattgattttaaccgtacaggggtgcaaaaacgataaagaataagattctttgtcgggggatcaagcagaaagattgctcagccggtgtctcagcagaaccacgcatggcagggcaaacataattttctatggacttccatagtttggtcgggatataacgccaataaatgtaagtgcctatcatgataaaaaaggcaggagagacaagagtttcggcagcttgccgctcttgtcttttttttgtttttatatcatcttcgcgtatatgtgtctatttttaagtttgcagaacatctgtctaagaatttgtccaattcctacatatactggtatcggaatcaaatgcttattgggagtgaaatagatgggatcagcacagttaacgggacgcgtcatcttcaaaggggaccccggctatacagaggcggttaagaattggaacccttatgttgatgtctgtccgcttgtctttgtttttgcacaaaattcatacgatgtaagtaatgctattaaatgggctcgtgagaagaatgtgcctatgcgtgtcagaagcggccgccatgctctggataaaaatctttccacggtaagtgatgggattgttattgatgtgagtgacatgaataaagttttcttagatgaaaaaaacgcggtagcaaccgttcaaaccggcattcacgtcggcccgcttgtaaaaggtttagctcgggaaggttttatggccccgttcggagacagtccaaccgtcggaatcggaggaatcacaatgggaggcggatttggagtgctttcccgatcgatcggcctgataagcgataaccttctcgcactgaaaatggtagatgccaaaggcaggattattcaagcaaatcaatcccgcaatgaagatttactgtgggcttccagaggcggcgggggaggcaatttcggatataacacccaatatacattcaaagttcaccgtgcccctaaaaccgcaaccgtctttaatatcatttggccgtgggaacagttagaaacggtatttaaagcgtggcaaaaatgggcgccgtttacagacgaacgattaggatgctatcttgagatttacagcaaagtaaatggcttgtgccatgtggaaggattgttcctcggttcaaaaccagagctggttcaattattaaaacctttattaaatgccggaacgccggcacaaacagtaatcaaaacactatactacccggattgtatagatttcttagatcctgacgaaccgattcccggcagatctgatcagagtgttaaattctcctcggcgtgggcgctcaatctttggccggaagaacctattgcagtaatgagacaatttttggaaaaagcgactgggacagaaaccaatttcttttttatcaattggggcggcgcgataagcagagtaccaagcagtgaaacagccttctattggcgccgtccgttgttttatacggaatggacggccagttggaaaaataaatcacaagaagcttcgaatcttgcatcagttgaaagagtgcgtcagctgatgaaaccatatgtaacaggttcatatgtgaatgttccggatcaaaatatcgagaacttcggaaaagcatattatggctcaaactttgcaaggcttcaaagaataaaggcgaaatacgatcccgaaaatgtattccgttttccgcaaagcatcccgccatcgtataaatagtttgatcgtttttggaaacaaataaaaaacacaccagaacattcaggtgtgtttttattgttgctaaattgggttattcaattgcatcccagtgcggattccaaacgatttcccataagtgtccatcggggtcttgggagtgaccggagtatccgccccaaaaagtatcatgagcgggatcagttatcgttgctcctgcctgttttgcctgttccatgactttatcggcttcagctttactgccaacattatgtcctcatgtaaattctgcagggcttggcgcagttaacgtaacgtttgtttcatgtgcgatgtctttgcggttccaaatggcaagtttcagtcctgtttgtaagtcaaaaaaggcaactgcaccatgttcaaattctgtaccggctattccctctgtaggcagacccaagccatctcgatagaagtgaagcgatttttctaaattgtctgcgcctaaagtaattactgtaatccgcggcttcatagcaatcattgatcaagagcaatataaagtattggacattttcattgaaaagattttgacatttcagtaaagaacctatatattcatatatgagcacataatcatataatgttatttttttgtccatgttagaatgcttcataacagaaaagaaataataaatgcagtgtatgagataaggaggagatttttatgggtcacaatcacaatcacgctggcggatccaataagaaggttttattgatctcttttatcatgattacaggttatatgataatagaagcgataggcggatttttaaccaatagtttagcgcttttgtcagatgcaggccatatgctgagtgactcaatctcattaatggttgctctgattgcttttaaattggccgaaaaaaaggcaagtcatcataagacattcggctacaaacgatttgagattctcgcagctgtgataaacggtgttgcattaatattgatttccctttatatcatttatgaagcaatcaaacgtttctctcatccgccggaggtagcaacaaccggtatgctgacgattagtatcatcgggttagctgtaaatatattggtcgcttggattatgctgaacggcggagatacaaagaataacctgaacataagaggggcttacttacatgtgataagtgacatgctcggatctgtaggtgccatactggctgcgatccttatcatcttcttcgggtggagctgggcagatccagtggccagtgtcattgtggctattcttgttctgagaagcggttaccatgtgacgaaagactccattcacgtattaatggaaggaactccgggaaatatcgatgtcactgacatcattcatacaattgaagagacagaaggaattcaaagcattcatgatttgcacatatggtctatcacaagcggattgaatgctctttcctgccacgcagttggtaacgatcaactgaccatttctgaaagtgaaagtattttacgcaaaattgaacatgaacttggagataaaggcattacacatgtaaccattcaaatggaaacagcagcgcataatcacgacaatacgattctttgtcaggcccaaactgagaatccgcgtgaccatcatcatcattaaagaaggaaatagggactcactttgtctgctgacaattaagataaaaccggaggggggattcatatgtacgacacgatagtaatcggagccggtcaggcaggaatctcagtaggatattatctaaagaagtcgaaacaaaagtttatcattttggataaaagtcatgaagtgggagaaagctggaaaaaccggtatgactcattggttttatttacttctcgaatgtacagctctttgcctggaatgcagcttgaaggagacaagcatggactcccttcaaaaaatgaaattgctgcttatctgaaaaaatatgttgaaagatttgaaatcccgatccaattacggacagaagtaataagtgtccaaaaattaaacaactatttcttaataaaaacaaaccgggaagaatatcaaacgaagaatcttgtgatggccgcaggtccttttcatacccctaatattccatcaatatcaagggatgtagccgatcatattcatcaattacattcttcacaatataaacattcaaaacaactggcgcctgggaatgtactggtagtcggcggcgggaatagcggggctcagatagctgttgaattatccaaagaaagagttacatatttggcttgcagtaataaaccggtttatttccctttatggattggaaaaagaagcatcttttggtggtttgataaattaggagttttacatgcaagtcatacatcaatattaggcaagttcattcagaagaaaggcgaccccatatttgggtatgaattaaaacatgcaataagacagaagaagatcatcttaaaacaaagagtcatagccggaaagcaaaatgaaatgatttttaaagattcatcttcattagaagtaaacaatattatttgggcaactggttttaagaatccgctttgttggatgaaaatagaaggtgttttggataaggaaggccgaattatacatcaccggggtgtttcagctgtggaaggattgtattttattggtttgccttggcagcataggcgaggttcagcgctgcttcaaggtgtaggaaatgatgctgaatacattgtaaaacaaatgaacggcggatagacagaggagagcagtaacttacgtgtttactgctctttttttgtgttgaataagtccggttatgtgactgtgtaaagccgaaaaaatcttttggcttaattaataagaagatccctgactcattgattgtgcaacattctgacgtacttcccgagctaactgcgcggcacgtaaggaagcctgccaaatagccggactcactgcagattgactgatggataatgcctgttgtgtggctggaaccattggtcttaggagattttccgcctcgtctacagatgacgcgtattggtgaccggctgctcttctcaggtctgctatcgctgcggggaagtttgaccatagacgaagtattgaattcatgcagccaaccataagaggaaaatgaggagcccggccttgtccggcggcgagaagctctgctgcgcctaaagcggaataaacgtgatagctcaacggagtaagatatttcgcgtgtacagtatgaagttctcgtaatccccaagtgtctggaagaaatctgaattctgaactcataccgcatcccagagcgagtgctctgctgacagcctgcaagtgtttcactaccgcagccattgattgttgaaaggaggatgagtgtattggaatttgttgaatcgcagataaatggcttcgcattttatgatttgcctggcttaaatcaggctgctgtctgtaatcatatacataatacggataataataatacatatctaaactccctttatgaatgacttttaggagcaggatatgcacccagattgtttttgataagggcatgtgcctaaattatccatcagtgcaacgattttagtccgcgcatattcagttggtattttttatgcaaacggatttagtggccaaaacgtttctgctaacttaagtcttttaggctgaacaagggaatttcttagtacggcacactctcattaccaaaagcataggataatatcacaaaaatttaaaattgcggggatgaaaaatgtattatatacctttttcgcatcaatattattattgtgtgaatgtaccgatgtatagcgatggaagatctgtttattggacttttccaaataactatgatccttcatacgaagatagaaaccttctcttgaaagattatggaccaaaaccattcgttgtgaatatcaataaagccgcaaaacaaaacaatacattccgtacggccctatggacgggaaaacattttcaaattactttaatgagtatcggcattggagaagatatcggtttggaaatccacccccacgtagatcaattcttacggattgagcaaggccgggggatcgttaaaatgggtaagagcaaggaacatttaactttccaaagaaatgtctatgatgactttgccattgttgtccctgccggcacttggcacaatgttgtgaatacaggtaatacgccgttaaaactgtattcaatttatgctcctcctaaccatccgtttggtacagttcatgtgacaaaggccgatgcagcggctgcggaagattagtataggattccagaggactttactgctgcaaagactataggaaaaaatcgtatttggacagcatcattaaataaagcgattgaatggctgaaaaaatattaacgtttcagcttgtcatagtgcagttgatgcgatgctttattccacaacttttcaacagcaaatgtggttttttgtctgtacattttaattgattggcagtcagtgaaaataggcaatccgcagggaatttgtaataaatttatccttgctcctcctaataagcggctttaactgccaagtttctgtttctcttcaaaccatttgcgaagctgatgaatatgagcttgatgatatctattatggtctgccatatgccatattccccattgaatggttgcttgtttttctgcttcataatctactgtatgattcagctgatcgtcagttaactcataacaaacagacttaaacatgctgaatacttcttcataatcagtgagaatttgttctaatgaaacaccggaaatgaaagggagcttattgttcagatctaacattggtccatacttctcttcaagctgctttggtatcggttcaccctttattctgaatatccagttgagatcaacatatgctaagtgtcttattagctgagctgtactattgtatgtttgatttggtcctttataatcaatctcctgctgtgacatgtctgacacaatggatattaagcggctgtaattttcattaacggcagaatacagcatcacctcattagcacaatttttatattcagtttgtcttattactcatatttgtcaagccatccagggaatgaatcgctagaggatgaagcaatgaagcaggctctctttgcctgctttttttgtgtgtcggcctatacatctgacatgtttgtttatctgaaactgtacctttttaaatgtcagacagtgttatatgatactctgcagatattcaagaatatgtacttggaggacattctcatgcgaaattttaatgttgctatccctacgccttttcatgaagatgaaagtttatatttagaaggatttgatgctattgtcgaacatttgaaaaacagcggtatccattcgttactcatatgcggcacgactggtgaacagcattcactcagcatagatgagcgtcttcagatcattgagtatgttcatcagcgaaaatttgaagatgttgaactgatgttcggtgtttcagccgtaagaaccagtgatgccgtcaaactgatgaaacacatcgagaaaaccaatattgattctgtactgattggttttcctccttatataagaccgacacagcagcaagccgtttattacgttgacgaacttctcagtcatacctctaaagaggctgtgctttataataaccccggccggaccggttttaatctgagtgagaaagcgcttaaagacttaataagccggcatcccgggataagggggctgaaagaaggaggagacgttctgcgtcataaacaaacagagttccctgatcactttattttgtttgcggcaggagacgttgaatttccgaagatgatgagtaacgggtgtaacggcctgtcaagcatggccggaaatgtctatcctgaagaaatcagagaaagcttcagcagcttatcagaaaataaaccgattaatctggaccgaataaacgatctgattgctgaagtgacaaatcatcatactgtcatgaatataaaaaatcactataagaagattgggattcaagcaggcagctgccggtcacccattatataagaaatgttccgtcgcggataagtgaaaaatgtgatcagcgcgctttctgtacttggattaggcttaataagcaagttatataatactgtcattagcgggggcgtaagcatttgtttagctttacataagggaaaccttatgatatggtgattattgctaatattgacaagaaagaggtgaaagcgatgataacgatttatggaattttgtatggtaagaatgcaaaaattggaaacatcttggcggacaaagggagcagtctgtccttttttaagccaaatcaccatacaaaaacagttatcggtgctttttctctatgtcaaataaacgataatccaatgacataatgtccttgtttatttgtgcatgatgttatttaagcgtaacaccgataattgtgtcggtgtttatttgtgcctgattttaaaaaaaggttagatgatcactcccttctatttactcaaacaaacaagagtattatggaaggatgagaaaacatgcaacaaaaaaacaagtatataagaattcaagagttcctgaagcaaaataaatttcctgattttagaatgaatcaaatcaaaaatgctgtattccaagggagaataaatcatttcaatgaaataacggttcttcctaaatccttgagaaaattgttaatagaggagttcggagagtcaattttaaatattgctcctttaaaagtgcagcattctgagcaagttacaaaagtcttatttgaaatttctggagacgaaaaaatagagacggttaatatgaaatataaagccggttgggagtcattttgtatatcctcgcagtgcggctgtcatttcggctgtacattttgtgcaacaggagatattggtttaaaacgcaatttaacgtcagatgaaatgactgaccaaattttgtactttcacttaaaaggacattcaattgacagtatttcttttatgggaatgggagaagcattagcgaatgtacaagtttttgatgctttacatgtgcttacaaatccggagttgtttgctttaagccctcgcaggttatctatttcgaccataggtattattccgggcattaaaaaaatcactcaggattatccgcaggtcaacctgacgttttcattacattctccttttaatgaacagcgaagcaagttaatgccgattaatgaacgctacccgttattggaggtaatggacacattagatgagcatatacgtgtgacctcaagaaaagtttatattgcttatattatgctgccgggagttaatgattctattgatcatgcgaatgaagtagtaaatcttttaagaagcagatataagagagggaacttgttccatgtaaacatcattagatataacccgactgttagttcacctatgagatttgaagaagtaaatgagaaacaagttgtaaatttctataaaaaattaaagtcagcaggaattaacgtgaccgtcagaagtcaatttggcattgatatagatgctgcttgcggacaattatatggaaattatcaaaaaaataagaaccaataaatcaggtgcagaactcggtttgacttcatattatttcatttgataacataaaatggttatcgtgattgaaaaaaagtacccgtttttataaaaaaaggagtcataacgttgctgaaaaggttttttcttgtttttcttacgctgatgatgtctatatttgctgtattcgcggctgctgaagagtctcccggcgatcgtgtcatttcttttgacgagcctatgattttattgatctcactcggaatcatcttatgtttgttcattcctccattcgtcatgtccttttttggcagtttggttgtgagaatcatatccggagtctatcaatgttttatcgttctcacgtttgcggggctcattccgattggatttctgatccccaatggctttttgacaattcttgctgccgtactggggactttggtcagttcagcgagtgttgccgtgaccttattcgttggcaggacagagaacacaaataagctttcgtaagcggttttgacaacaataacacgcgtcctgaaaacaccaagtgtacagacccttggtgttttttaattccggcagaaaagaaggtataatgggcggagaagaggtgtcagccaatgaaaataaccagagagacattagaaaaacagcaaatttggatatatggtgtgactcttgtaatcggcggaatagcggggatcgccgggaaagattcaggacttcgctggggatggacgatatcaccgcttatcgctgttctcatgtatgccatgtttgcccaaatcccattcttgaagctgaaggaagccatgtcaaacctcaagtttatggcggctttattgatcggtaatttcttagctgtacctgtcgttgtatgggtgttaaccgccatttttcctcaatctcctcctatattattaggggtttgtttggtattgcttacaccttgtattgattacgtcatcgtctttactcagctcggcaaaggaaatgagagattaatactggcttccacgccggttttgttcgccgttcagatggtattgcttccgttatacttgtggctgtttatcgggaaagaagtgataggggctgttcatgcggggccgtttctggaagcattcttatgtttaatagcgggaccgctgctggcggcagtgatgacacaattgtgggctgataagaagccggcgggagaaaaggtgttggagtggacggcgtggctgcctgttccttttatggctctggtcttactggcggtcgtcgccacacaaatcggaaaggtcatcagtgatgctggcatcattatacgtgtgattccgatctatctgttattcctgctcattatgccgtttgtctcccggtttatcgcatatgcgttccgtctggatacaggtgaaggaagagcattgatcttcagcacgggcacaagaaattctctcgcagtccttccgttagcgctggctctgccggatgcttgggcctcattagccgccgctgttatcgtcacacagacgattgttgaattgataggcgaattggtttatataaaagcggtgcccggatggctgctgaaataaaaaataatttgaactgaaaaaaacataccaacaaatattggtatgtttttttatgtcgattataaagttgaaatatcaatgacgaaacggtagcggacatcgctttggagaacccgttcgtacgcttcgtcaacttgattggccggtatcacttcaattttaggagcaatgccgtgctcggcggcgaaatcaagcatctcctgagtctgcggaataccgccgacgagtgaacccgcaatgctgcggcggcccgtgattaaggagaacacactgtatgagtccggcttagcgggcgctcccacatttaccaatgtaccgtcaatgcgaagcagggataagtaggcatctacgtcaaggttcgcggatactgtatttaaaataagatcaaatcgtccggccagctcagtaaatgtatccggatcgcttgttgcaaagtaatgatcggctccaaattcaagcgcttcgtcttttttgttcattgagcggctgaggacggtgacctctgcgcctaaagcgtgcgcgaattgaacggctaaatgtccgagcccgcccattccgacaatcgccacttttttgccggggccggcattccagtgtttcagcggagaataggtggtaatgcccgcgcacaatagcgggctggcggcatctaattccaattgatcgggaatccggacaacgaatctgtcagtgacaactattttctggctgtagccgccgtacgtagggtttccgtcgtagtccaggttattataagtctgaacaacgccttttgtgcaatattgttcgtctccgttcagacagtattcacattccccgcaggagtctacaaaacagccgacacccacacggtcgccgacggcaaatgtggtgacttcttcacccacggcttccacaactccggcaatttcgtgtccgggaaccatcggaaagattccgccgccccattcatcgaatgcactgtggatgtctgagtgacaaatcccgctgtacttaatatcaatcaggatatcgtgcggccgtaatgctcttctctcaatcgttgtccgctcaaatttagcttttgcatgcggagcgcttaatacacgagtcggatgattattgcacatggttatcttcctttccaagataaagtgatgaatcctctgttcaattttactttaaatgttaaagcggactttaagtcaaggagtttggtttatttttttatgaaatgatattctataatggcacgcttatgaaaggtttgaaggacgggtgataagaatatgaagattgcgcaggctgcaaagcaggttgagttatcagccgcaacgcttaggtattatgaaagtataggactgattcctccggtaaaacgcgatgaaagcggcatccgcgattatgacgaagatgatgtgaattggattgaatttattaaatgcatgagaagtgccgggctgtcgattgaggcgctgattgaatataccgctttatttattgaaggagccgatcatacgatcgaaccccgaaaaaacatcctgataaatgaaaggaaaaggctgacggagaaacagagggaaattgatgaaaccataaaacgattaaacaggaagattgaggattatgaagatatccttgaaaatgaagcgaaacttaaaaacagattgaaggctgaatgtatttctgaatgaagagaaggtgtcccggacgccgggccgcatgaaatgtaccaagggaaacgagccttggtttttttattttctaaagagtggaaacaaaacagctttttctatcttatcaatcattacttatccttttttcagcttgacttttttactgcagacttttaaagtgtgaaatgttgcttagactgtgattagcgactttaatgctgaaaagaggtggtttacccagatgaacaataaaaagaacccttgggcgttagtgcctttagtcttattcgtagggctttttgtcggctctggtctggtgaccggagatttttataaattgccgatcttgattgccgcgatcattgcgtcagcttttgcgctgttatttaaccggaagaaatcgctcaatcaaaaaatagaatggttcgcttccggtgcgggacatcctgatattatcattatggttatgatttttatattggcaggtgcctttgcttcggcggctgaagcgatgggagcggtgcattcaactgtcaatcttgctttgagcgttattccgcagcagtttttgctgccggggctgtttatcattgcttgttttatttctatatcgatgggaacatcaatgggcacgattgcggcggttgcgccgatcagcgcgggtctgagcggagagcttggaatctccggcgcgattacgatggcggctgtggtcggcggagctatgttcggagataatctttcttttatttctgatacgaccatcgcgtcagtccggacgcaaaaaacacaaatgatggataaattcaaaacgaactttctgattgttttgcctgctgccattgtgactgttattatcttattttttattccggcaggccacgccggccatacgggtgctgaatcttacagctggattaaggtgcttccttatgtcgccgtgttggtttttgcgttaatcggtattaatgtgatggctgtcatattcggcggattggttttgacgggaatcatcggattagcgggcggcagcctgacgcttgactcttattttaaggcgattacggatggaattgccggaatgagcgatctgatcatcctgtccatgctgatcggcgggatggtcggcgtgatgaaacaaaacggcgggatcgactttttactggagttcatcacgaaacgaatccgttcgaaaaaaggcgccgaagccggcattgccggactggtcagcgtgacgaatctggctgcggccaataatacgatctcgattatcgcagccgggccgattgcaaagaatatcgctgataaattcaacatcgacaacagaaaatcggcaagtattctggatatcttttcgtgtatgatacaaggattgattccttacggcgcgcagctgttatcagccgggaaattcgggaatatttcacccgtcagcatcctgccatactctttctatcccgttttaatcggaatctgcggcatcgccgccatcatatttggactgccgaaattcacaagaaatacgaaataaaaaaaggcgccgttcggcgccttttttctttcatgacagccaagcatttctcaaaagctgtacgccatgtgtgatctgatccgtatcgagatgggcgaaacccagctttatgatcggcggttcgggtttttcggcaacgaaataaacggcggtaggatataccttcactccgtactgaaaagcgcgttcgattaatgtttcttctgtatagttcaggtgaactctcaccaatatatacaatcccgactgctcgccgatgatcgtcacatgaccgccgaactgctgctttacatgtgaaatcaagtgctgcatttttcgcctgtaaacaatgcgcatgcgcttaatatggcgggtccattcaccggccttcatcaattcagccatggtcagctggttaagcgaagaagcggtgctttcgaaatgaataaaccgttctttataccggtgcaaaaggcgctgcggcaaaaccatatagcttatgcggatgcccggaagaaaggattttgagaaattccctaaataaatcacccggtctgattgaatggaagcaagagcgggaaacggctgctgtgtataacggaattcactgtcataatcatcctcaagaatataaccctctctatgattcacccaattgatcagagtttggcgctgctgaatggacatgcttacgccgtaagggctgtgatgggatggggtcacatagattaatttttctttcattgcatgtaattgagaaaaatcagctccgttttcatagacaggcatcgtttccagaggtagcccgtgaaattgaaaagccgctctggcaccgtcaaatcccgggtcttcaacgatcattcccgaaaaatcctctttcagaatccggctgagatatatcagcatctgctgcgtgctgctgccgatgataatggaatccgcatctgttttcactccgcgggattccaagagataagcggcaatttgttcacgcaggtctctctcgccgaacggttcaccgtacaggaagcttttctctgatgtcaaaacttgattgtataattttctccatgttttcagaggaaaatgcttttgatcgacggctccggcgcgaaaatcaatcaggaccggctgagttgattcggttttttcagcgtaaacaacatcgttttctttttgaaatatagaaggttctacttcatttgcaaaataacctttgcgtgtttctccgcgaatgtatccctccgctaaaagaagatcataagccatcagcgttgtattacggcttacccgcagggaatctgccagctcccgaatcgaaggcagccgctcatctgcctgaatatttccctgctcaatcaatgttttaaattgctcgtaaatttgtttgtatttcggggtgtcgctttcgaaagcgaaaatcatatttttcatcagatgttctcctctgacatgtgtatttattcctaactgtacctttttaaatgtcaggtgatatcttattatagcggaaagcgctttatcaatccatgttcgagaggagagttttgtatgtatattccggctccatttcagctgagtgaagctgaagcgtgcgatgtcatcaaagagtatggtttcgcagcattgttttcaacggcgggaggcatgccgtatgcaacccacctgccattgatgatgagtaagaataacgaatgcttatacggtcattttgcattgccgaacccccaatggaaagagattgatggccaaaacgtgttagccgtttttcaagggccgcattgttatatctcgcctaaatggtatgagacgaatcaggctgttcccacatggaattatgtggcggttcatgtttacggagaggcggagcttttggatgaggaagaaaccgtgcagtcgatgagtgatctcgtattgaaatacgaaagccccgacagcccgtacaaattagaggatgtcgatgcgaaattgctggcaggcatgaacaaaggggtaaaaggctttaaaatcaatatcagcaaaatagaggggaaagcaaagctgagtcaaaatcattcagctgcaagacaagggctggtcgtacaacagctcaaacagattcctcatacaaacgaacagctcatttccggcttgatggaagaaaacatcaaacagatcactgcgaacaactgacaagcatgttaaaaacataccggcagcatgcggtatgttttttcaggttatgaagcttttctcaggatgaataacgactcaaacagcacataaatcaacggcgccattaaaatgaagaaagaatgaaaaatagcatacggtatgagtaagtaaacgataagtttcaatagaatggtagacggtttattgaatgtccagcggttcttcaagatatcagtcatacaagctaaaacaaggccgaccgtcaaatatccggctgctatgtaaagataaataaaaaggtaaaacgggtaagaagacaacggcggtgtgtcttcctgtgtcatttttaaactcatgtaaaagaccaataaaaagcaaacggacgaaatcagagccagcaaaaggtgtttatataaatacttcttcatgtgtttcacctgcctatggcgcaattatttcttaacatattatgacatggttttaccgctgctgaaagaatcggcagctgaaaaagacggcaaatcccgccgtctttttttatatcttaagatttcttaagaacttttaccgctttttcttcaggttttgaatgtaaaatttgatttataaattcgagacaaatggaaaaattaaattatacccgtaaatttaagggtggatggagagattaaagatgaaacgcctgttattcttatttcaatatatcatcaaaccaagaactgtcggcgccgttctgcccagctcacattttcttgctgagaaaatgaccggaaaaattgattttcataaagctgaatacattgttgaatacgggccgggcacgggagtatttacaaaaaagctgcttgaaaaacgtcagcctggggcgatgatcttattgatagaacaaaatgaggaattttatgctttactgaaagaaaaatataaagaggaacaaaacctatttattgtacatggatcggctgaacatattgagagtcatatgaaggagcatggaattccttatgccgactatgtcgtctccggacttccttttgcaagccttccaaaaaaagtgtctgctgatattttgacgaatacggctaaaatcttaaaagataacggagaattcattacgtttcaatatactcaatataagaaggcattgattgagcaattctttccgcaaatagtagtaaggagagaaatcaggaatataccgccggcttatgttttcagctgttcattgccgaaaaaaaagagggaggattcatatggggacaaccattctaatcgtagatgatgacaaagatatccgaaacctgatctctgtctatttagaaaatgaaggaatagacacacagaaggcgaaagatgctgctgaagcattaaaattattggagcaaaaggagtttgacctgatcattttagatattatgatgcccaatatggatgggattgaagcatgcatgaagatcagacaggaacgaaatctgcccatcatcatgctttccgccaaatcggaggatatggataaaattcaaggactggcttccggtgccgatgattatttaacgaaaccgtttaatccgttggaattgatcgccagagtgaaatcgcagctgagaaggtataaaaaatacaatacagatacaattagcacgaagaacgtcattgaaatcggtgatttgaccgtgaatacagatacaaggcaagtgtgggtgcgggggaaagaagtcaggctgactccgaaagagtttgatattctggagttgctttcgagaaacaaaggaattgtcatgagtgttgaaaaaatatatgaggcggtatggaaggaagacttttttaagtcggacaatacggtgatggtccacatcacaaagatcagagacaagatagaagaggattctaaacatccgatttatatcaaaacggtatggggaacaggatacaaaatatgaagaagtttggaaataagctgattgtcaggcttctgatcgcgatcgcaattagttatcttgttgcatttggtgtgttgattcttgttattttatctatctcatatctgtacaaaataaattatttaacagatgtgagccagggaaacgctaattttaggatactgattcaatttactgcagctattttgacctttattgcggtttttttgttattggtgcggaaaaaaatattatatttgaaacacattacggagagtgttcaccatattgccaatggaaatttaggcttgaccatcaggactgaaagcagggatgaattgacacagcttgcacaacatatcaattatatgtccgaagaattagagagtaaatttgaacatgaaagacaattagaacgagcgaaaagtgagctgatctcaagtgtatcccacgatttaaggaccccgttaacatcaattatcggatatttggatctgcttaaaaaagaacaatacaacagtaaagcccaatttcaggagtaccttgaaacgatttattcaaaatcgcaaaggctgaaatatttaatagatgaactgtttgaatatacacatttatcgagtccggacgttactttgaaccgcagcaaaacagacttgtctgccctattggaacaaatcaccggagagtacattcccatttttgaaaaggaacaattaactgtccgaaaatcaattacggaagaacatgttcccgtctgtattgatatagaaaagatggttcgcgtttatgataatctttttatgaatgcgctgaagtacagcatcaaaccatctgaattgttcataaacctagaaataaaagatgaaaaagcaattttgcaagtgtcaaacaaggccgaaaatctccctgctgacgatatcaatcaattgtttgaacggtttttcagaggggataaggctaggacgggtcatcaaggtaccgggctcggacttgccatttcaaagagaattgttgagcttcacagcggccgtattcatgcggattacagcggcggatggcttcgtttttctgttgaacacccgattgactagagcttgtgggacaaacgttccgtaagcttttttcttagaataacttaagaatacttaagaattttaccggctgtttcttcatttttttttcttatgatgtgatagaaagcgaggagagcggagaaattgaaaaataaaatgattttattatgtatatggtttttaggcgtttattgtttgaaggaactggacgtgctgtcatttgatatgaatgatgtaacggactttatatcagggcatgtgcaatacgcgatgctgctgtttttggctttgtgggtcgtcaggcttctcttttttattcccggcatgacgctgatgtttttgggcggaatctgctttgatccgatggtcagcattttattatcaatggccggcctgtttataagcgaaacgttggtttatcttttttcaaagaaattcgccagcgaaaaaacgactcaattgctggaagataaatatcctgacttgaaagtgttattggaggcgtataattataagtttttggcagtggggatgctttgtccggcagctcctacggatgtgatttgttttttatccgctgcagtcgggttaaagtattctgcctacatgttaactgtattgatttcaaatattcctatggtgctattgtccagctttgtcgttatcaatttcagtgaatcaatgacaggtattgtgttagtgatcgtttcgtttctattgattacgatcttaacggtgagaatgtggaaccgcatgaagcaaaattactcatgaaacaggggttttttgttccgaaggatgtaaagaagaatacatcaaaaaaagctgtcagcttggtcctgacggcttatttttagtgaatggcttatttctccgtggtgaaataaagcaatgcgatgaccggaaaagcgattccaatccataatgtgatactccacccgcctgaggcgtatgcccatcctccgattgatgatcctatagcaccgcccagaaagaagatggccataaataatccgtttaatcggctgcgaaattcaggtgccaacgaaaaaatggcacgctgactgagtacgagattggcagatacacccatatccaacaggatagctgcggccaccagaactgctattccgacgggggagctgctctgaatcatgagcgggagtaataaagaaacgatgacagcaccgagagcgattccggtggcaagccgggtcaggccgcgatcagccagacggccgcctatcggtgcagccgctgcacctgcaatgcccgctaatgcatacagcgcgattgccttttgagaaaaatgaaaagcaggaccggacaataataaaggtacagtcgtccagaacaagctgaaagctccaaatacaaacgcatgataaatggcacggcggcgtaagaccggagtcgtgcgcagcagcttccacattgaaccgagtaagacggtgtagcttgtgtttgctgttggttttctggcaggaagcacttttgataagacgattgccaggacaacacttaacgcggcggataaagcaaatatggcattccacccccatatatcagcgaccagactggatatcggacgggaaagcataataccgagcagcaggccgctcatcacattgccgacaacccggccgcgtgcggcgtccggtgcaaggtatgatgcgaacggaactagcacttgggctgcaattgatcccagtccgatgaaaaacgcagcggctaaaaacagtgttccatgcttcgcaaatgctgtcagtgtcaaagcggctgcgcttagaaggagcgatacaacgacaagttttttgttttcgataatgtctcccaaagggacgagaaacagtaagccggcaacgtatccgatttgagtcagtgtgacaatcaatcctgcgctgcttggagaaagcccgattgccgcactaatgaatcctgccaagggctgtgcataataaagattagcgacaatgataccgcatgccgttgcgagaagaagggttaaaccaggtgaaattccctgatctgctgtttgtttgttttctttagccatatgaatgaactcctttttaagtgttttttatgatgcttgataaatgatttgctgattcatctcctttacgcagaggcttttggagtctgcatttcatcaagacttccctcaagttattttataaactaaacgtttagttttattataaacaaataatatactaaacgttcagttttgtaaataggtttctgttttctttttttatacaggttaagtatactgaacgtatcgtttataattcgggaaggaatgattcatgtgcagagtaaacgaggacggccgcgcgatgaaggaacacataaggcgattctttctgcagcgtatgacctattgttggaaaatggctttgacgcggtgacagtcgataaaattgctgagcgtgccaaagtgagtaaggcaacgatttataaatggtggtcaaacaaggctgccgttatcatggacagctttctttcgaccgctacggacagactgcctgtgcccgatacaggatcaacagtgcaagatatattgacccacgccacgaatttagcaaggtttttgacgagccgggaaggaaccgttattaaggaattaatcggtgcggggcagctggatgcaaaattggcggaagaatatcgcacgcgatttttccagccccgccgcctccaagcgaaaggccttctggaaaagggaattcaaaaaggtgaattaagagagaatcttgatattgacgtaagcatcgatctcatttacggaccgattttctatcgtctgcttattacaggtgatgaggtgaatgattcctatgtgcatgatctggtgatgagtgcgtttaagggagttcagcctgcctgaaaaatagccgggtcatgtgaaagagatacagacttctgctgcctatgggcggaatataatgaaaaggccgaacaagttcattgttcggccttttctgattgatttgcgaactgccgggcggccgccacgcaagcgataacgccgacattcaccgccgcaagttcccatcctgctttttcatggagaatcatggcggccagtaacagtccgaagaaaggctgcagaagctgcagctgcccgatcgcggcgatgcctccctgggcgagtccgcgataccagaatacgaagccgatcagcatgctgaatattgagacatatgcaagactgagcagtgcgggcgcgccgatgtttgaccatgagtccggcatgaagcagaaagacaggatgaacataaggggaagcgataaaacgagtgcccaagagatcacctgccagttgccaagccgccgggagaggcgggcgccttcggcataaccgagaccgcacacgataatcgaagcgatcatgtacgtatcaccgagcggagaggattctcctccttgcagcagagcatatccggctacgaggatgctgccggcagccgagaaaatccaaaagaccggcctgggccgttcgcctcctcgcagtacgccgaagatcgccgtcgcaagcgggagaagcccgatgtagacaatggcatgagcggatgtgacatgctgaagcgctaaggccgtaagcagcgggaaaccgatcacgacgccgagcgctactgttattagtgaaatgatgtcgcttttggcagggcgtttctcctgaaaaatgaggagcagagcgcctgccaatataccggctatcgcggcgcggcatacggtgagaaataccgggtcaaagtccgctacagccaagcgggtcgccggaagcgagccgctgaaaatgagtacgccgataaatccgttaatccagccgtttgcggctttcttcattccaatcactccaatatatatttctaaacccattttcaaagtttataatgactataaactgaaattggccttatacaaatggccagtttttataaaaagaagaatgccagtttggagggagcaaaaatggatatcacgccatttttaaatagagatctggatattccgctttatcagcagctttatcggcattttaaggaaaatatgcatcagggccgtcttcctaaaggactgaagcttccttcaaaaaggcttttgtcaagtcagctttccgtcagtcagacgactgtagagcgggcctatgaacagcttgccgccgaaggttatattgtcagtaagccgagaagcggatggtttgccgattatgactcggacgccgtctatgtgaaaaagccgggcgcttcgcccgttcaaacaaaggcgaaggaagaccgtcaatggattgattttcactacggcactgtggatgccgctcattttccgttttcggcatggcgcaaaagcatggttgcaagcttagatcaatacgggcatgagctgtatcggcccggggatgatttgggcgagcttgaactgagaacgctaatttcggagtacttatatcagtcgcgcggggtgaattgccgtcctgaacaagtgatagtcggcgccgggaaccctgctcttttgcaaatgctgtgcaaaatatttgaagcaaatctatccatcggatatgaagatccgggttatccgagagcgagggagatttttaaagccaatcacatgaagatcattccgatacccgtcgatgatgaaggagtctgtatccggaagctgaatgaagagcggccgcgtcttgtatatgtcacgccttctcatcaatttacgttaggaacgattatgccggtaaacagaaggattcagctgctgaaatgggcggaggaacatcaatcgttcattatagaagatgattatgacggtgaattccgatacaccggccagccgatcccatcattgcaggggcttgatcagcatcaccgtgtcatttatatggggacgttttcccaatctctgcttccttcgctgcgcatcagctatatgattcttcctttgccgcttattgaaaaaggcagggaaatcgcttctttatataaacagaccgtctcctgccacagtcagctgacgctggctcaatttatcaaaagcggagagtggcagaaacatattaacagaatgagaaagctgtaccggaaaaaaagagcggtattattagaggccgtgcggcgcgagctgggacaatacgtcaggattcgcggggaaaattccgggctgcggattttacttgacgttcagctgcctttcagcgaaaaagagctgattgaaaaggcggaggaacaaggcgtcaaaatctatcccgtgtctcttacctatcaaaaacaggtccctgaaaaaacagtttccctcggtttcgcgggggtttctgaaaccgatatacaagaaggcataaaaaaactgagagccgcctgggcgctgtaaaaggcagctcacagtttgaaatactgaagcttgagtcaggggtgatgtctcagcagcaaaacgatttataggacgggcaggcggagcgccgtatcaatattttgcaaattgagccggacttgttcatttgtgttccacgggtgataccagcctttttccatcatatagcgtgagatttgctcatgcatgtcgatggcttcttctaagtgacgggtgaggatcgctttcacttcaggcgtttcggcttccgtcgccgccatcgcatagtttctgacaccgctttttgccgaattcaataaatccatagcgacaatttggtctgtcagtgcattcattcccgtcaagtattcaataatcggattcattcgttattcatctcctattcatgctttgcatcagataaaatcgaggcaaactcctgcaattgccttgttgatgtatccgcatcctgctgcatgatttctttcagctgcggatcggatacgagcgctttcatggttttggatttcgtcagacaaagtgacttaaaagaagccatctcctgaatttcgagtaattcatgtaaggcgcgggccatttctgtagcctccgttctttaaggtttgagtacaacttttatgcaatcatctgttttcgtgtcaaacatctcatagccgtgcttcgcttcactaagcggaatgacatggcttacaacatcgcccggatcaattttgccggttgacaccaattcaaacatatacggcatatagtggatgacgggagcttgtcctgaccggatattgacgtttcgctgcatgatatcgccaaggggaaacccgttgtatctgccgccgtacacgcccgtaatctggatcgttccgccttttcgcaccgcttgggatgcgatgaccaatgcgctcatcgccccgccctgaagttttaatccgctggcgaggaactcaaggtctgtcattttcccgtccatgccgacggcgtcaatgacaacgtcggcgccgcctttggtgatttccttcaggtagctgcccgtattttcgtggtcttcgaagttcacgatttccactttattcgtccgtttcgcatgctggagacggtagttgacatagtctacggctattacgcgtttcgctccctttaaccagcagaatttttgagcgaaaaggcccacgggcccgcagccgagaacgataactgtatcgccttcttttacgccggcattgtcaacgctccaaaagccggttgtcatcgcatcggaaataacactcagtttctcatccggttcttcgcatgtttcgggaactttaaaatgagtaaagttcgcaaatggaacgcgcaaatactccgcctggcctcccggatagccgccggcatttcctgaatagccgaaataagcgcctatatcgccgttctcatttgattgatcacattggctttccaggtgatttttacaataaacgcattctccgcaggcgatattaaaaggaataatgacgcggtcgccttttttgactttcgtcacgccgggaccggtttcttccacgatgcccatcggttcatgcccgatgatgtagtcttcctgcaagttcgggatgagtccgtggattaaatgtaaatctgatccgcaaattgccgtacttgtgacttttataatcatgtcatcgtggttttcaatcttcggatcaggcacgtctttcacaacgacgtttttcactccttgatacgttacggccttcatgctgtgatacctccagtgttagtgttcatcaggtgtgcggtcaaacatcccttttctgttcgtttcaacgggaaacagattcatatttccgaccatgagggtatttttcgcagagagctgatccagtttatactgttcgctcagatcatgcgggtgaaaccactttttgctgaccatcaagtctgttatctcctgatgcatcgtgattccctgcatgagctgtttgcgaagcaaagctcttacatcaggtgaagcggtttctgttaaagcaacggcggtatttctgacgccttctttggcgcgtatgagaaaatccattgcgaatgtcatatccgcaagttcagggacatgtaatgaattgatcggatctaaatggtcatgattcaatgatgcttaccttcctttcaattgatgatcgaagtcggccggttttgaggaacaggagcctgaaaagatgcccgttcataaaccgtctgcagatcagccaggtcttgtgaggcttgctgaacatctttctccattaacgttttcaggtcctgatcaaacacaagcccttgcatgagcttggatttcgctacacaaagcgtcttgaagttaatgatttcatgtaagtcaagcgactcgtgagccgctaattcacgcttatccataatcgtctgaaacctccctttgtagaaatacgtagttaatttcccctgagaaaagaggtctagtcttacaaattttgtttatcagataaagcggagagtcaaaaaagaggaagcacaatcgcttcctcttgttcacatggaacggctgttggtgtcatgaacatttttctgatgcgcgggcggttttgccgcgcgggagacgagaccgctgagcaaaatgccgatcagtacgatgatcagtgctttaacaaggccgaattcttcaccgagcagtccgagaacgggagggccgactaagaaggcgcagtagccgacgaaggagattgctccgacccgcttaactgctccttttgggtcatcgccggctgcggaaaggccgaccgggaagccgagggaggcgccgattccccaaagaaagacgccgattacggctgctgtgaggtttccgctgaaaatcacaagggaaagtccgatgacactgatggcggtgcagagacgaagaacgggcacgcgtccgtaccggtccaaaaatgccccgccaaagatgcgggcgatcagcatagcggtgaggaagacgccgtaaaccgccgtgccttgcgcgtgcgtcacgtgaaaaccatccgtcatggtgagcggaagccagtcattggccgacccttctgcgaaagccattccgagcacgatgagcccgatcagcagtgtgcgcggctctgtccagacgtttaccggcttttcgcttgaaacttcctgccaccttgagacggcatcttctttcccggtgtcctcgggcagaaaccggaagaaagtaaaaatcaggataaactcaattccggcaatgagcagcaggtgaacgagaacgggaaccttgaataaaatagcgagagaggcgagtcctgcgcctagcaatgtgccggcgctgaatgatgcgtgcaatgcgggcatcatggttttcccggcggcgcgttcaagggcggaaccatctacattaagggccacttccgcaagtccgtagccgagcccgaagatgatcagtccggcaaatacgatgcttttgaaagcggcaaaaacacctgcgctgatgacgaatatcccgataatgacaatcagaacgctgatcaaagcaacgaatctggtgcctttccgcgagatgatccggctggcgcttaacaggccgatcaatgagccgcatgcaagcccgaaaataatcaaccccatcattgacgtcgaggctttcagcgtttctctcacctcaggcgtgcgggaaatccaggatgaaaaagcaagtccgggcagcgaaaaaataataaaaagggcaagtttccatttttgaatgccctgtctactcatgaaatcagctccctctctgccaaatgaagcggaaaacgcagagattttaatgtgatggcaatcaatcctttttggtaatagggctggatgtcatcaataagaatcagctccggcatgtgttctttcgggacaaaagcggagcatgcttcataaacctgttccatatccaacccttttgataattctccgataaacgcaatggcctgcggattgatgattgaaatcatggcgcttgtcatcttaacagccagttccggaaaagaatccggtgaatagagcttttcaagctgctgcttgcgtgtcgattcaaatggaatataagaaatttctccggcgaattgtgtattgcctttgactaagcgcccgtctataacgaagcgcgctcccggaggattgtctttgacaaatgcggccatggcgatggttttcgggacggaatattgctgatcgcgataaaatccgtacaaagcgtaatgcatctcgttttctacattgaccttgacagaatatctggcttcaagtctttcctgcatcgggatatcacacagctcttcagtgtcacaaatgccgatgacgccgtggctgaccacaccctgaacccctatgccgatcgcctttatattgggaaaccgccttatccattcgtcagtaagccgttcgatgaggtcataattgatgacatcataaaagcggctgtctttttcaacatagtcaccgtgccaatctgccagcgcgacgtcaatcgaatggacgccgccttctgttttaacggatatgccgagtaccaaatgactgtccgcatttaacgtaaactgccttgcttttcttccgcctgttgaggcgctcggttccatttccatgacttcgccgcgttcttttaattcatgtaaaatgtttccgcacgtggcggcgctgagccctgtttgttgagagagaaaggaaatggtggccgcatccgttttcagcagcgcttcaatgatggtctcttcattcgttttttttacaatggatgtattattaatggtattcgccatgattccgcactcctttattaatcactttttaaaagacttattaaaagtagcttaaaatatactttccgaatcagtcaagacggtttaaaattgttttcaaacggagaataaatagaatatccttgctgagaatggaggctcgacacatgagttctgataacaaaatctattatgaacgcggaacggaagagctgaggaagaaaaacatccgggcgcataggcttgtccgggaattaaacgacgccgattcggaagcgtttgaaacaaaagaagcgatcatcagagaactgttcgggacggcgggagagaaaccgagcattgagcataactttcattgtgatatcggaaccaatattcatgtcggcgatcatttttatgccggctataattgcaccattttagacatggctgacgtgcggataggcgataactgtatgatagggccgaatgtcgggatctatacagccgggcattctctgcagccggaaggaagaaataaaagcggttacggcattccgattacgatcggcagcaatgtatggatcggaggaagctgtgtcattttagcaggcgtcaccatcggcgaaaactccgtcattgcggccggtacagtcgttacgaaagacgtcccgccaaattccgtcatggccggaaacccgggaaaggttataaaaaagatatgaacaaaaaagcagcttgcgaacaatcccgcaggctgttttttctttcacccgtcatgcaggaaagaaggggaaggtgagaagcaggcacttatggtatgatgacaaatagaataaaacctcgtgaggccggtcggctaaaaggaagtggacagagattgtttggtacaaaacatcaagaagactatgtctcccgtgacagacgttcattgcatatgcttgcgcttcgggtgcccggtctggcgtttattttaatggtatatgccgcatcagtctctttgcagtacatttatgaaagctggacggtttttttgctgctgttattcacaatattgatcgtcatttttaccgtgctgcactggcattcccatcgctgggtgaagaaaaaaacgtttctttatttcatcatacagggatttatcatatatacatcggctaacttgatgactggcggctatattgcggttgtcgtcggtctctatgcctttttaatcgggcagattatcggaatggcggataagggaaaaacgctgctcatactctatctgttcattttaatgtctataacagctttgcaccaggagcatccgcatcatctgctacgtttcatcgttatcgccgctcccatcatgatcgtgattatcacgtatgcggccacatttttcgcacaagttgatgaaaaaataaaaacacagatgacgcttgaaaaattagagctcgctcaccggcaagtgaaacagctgacgctccagaacgaaaggcagcggatggcgagagacttgcacgatacgcttgctcaaggattggtcagcttgcatatgcagcttgaagcggtgcatgttcatctttcaaagggtaacactgacagagcgaaagacatcatcagccagtcaatggacagagtgaaaggcacattggctgatgcgcgctcggccattgacaaccttcgcagcacatcagaaaagatcgggttcttaaaagaaagcatcactgaacaaatcaaccattttacagaagcctccgggctgtcttgttttttagattacagcgtgcatcatgtgcttgacgttcatacggcggagaattgccattacatgatcggagaaggcctgacaaacgccgccaagcatgcagaagcaaagaatgtctgggtatccgttcaggaagaagagggacagatccgcataaccgtcaaagatgacgggaaaggctttgatgccggaacagaaatgagaaaaagcggacattacgggctgcttggaatacaagaacgcgtcaatatgatgaacggcactttccgtataacaagcgccagatcagcgggaactcaaattgagatcatcataccaattcaaggagaggcggaacatgtataaagtgttaatagcagatgaccatcttgtcgtcagagaaggtctgaagcttttgatagaaacaaatgaccattacaccataacgggagaggcggaaaacgggaaaaccgccgtccgcctcgcagaggaactaaagccagatgtcattctcatggatctgtacatgccggaaatgagcgggctggaagccattaaacagataaaagagcattctgatgtgccgatcattattttgacgacctataatgaagatcatctgatgatagaaggcattgaatcaggcgcgaacggttatctgctgaaagacacaagctcagaaaccttatttcatacgatggatgcggcggtcaggggagaagtgcttctgcagccgaacatcttgcggcgtttccgggaaatgaaaatggaacgggcaaatgccaatgaaacacagctgacggacaaggaaatcatagttctagaagccgttgcgcaaggacataaaagcaaagcgatcgccttcgatttaggaatctcagagcggacggtaaaagcgagattaacatcgatttataacaaattaggcgctgattcgcggacggaagccgtcaccattgccatgcaaaaaggcattctgaaactgaatatataatgaaaaactgcccaaacgtacatgcccctatgtacgttttttttatgtgaatgtgaactacaattaggcagaaagtaatgattggagaggagtattcgatgtctggttttttatataaattagggggatggtctgcccgcaatcgattaaaaatgatcagtgcgtggctcgtgatactgatcgcttcggttgtgatcgccatctcgttaaaacctgctttttctgaggatatgtcaattcccgacacaccttctgaaaaggcgatggatatcattcaaaaagaattttcaaagggtcccgataaaggaagcatacgggttattttcggagctgaagaagggaagaaattgacgtcaaaaccggaaaaacaagcggttgaagagacattaaagaagatcaaaaccgatcattcagtcgcttcaattgcaagtccttttgagacaggaaccatttctaaagacggatcagtggcatatgccgatattacgtacaaaaaagcggcggatgacattacggatgcgtctgtttcacatatgaaacacagtctgtccgccgccggagacaagggtctgcagacggagatcagcggcgatgtgccgggggccggtgttgaaatcggcggtgtatctgaaattgtcggcgttgtgctggcattcgtcgtactggctattacgtttggttcattagtcatcgcggggctgccgattgtcacggccttgattgggttaggtgtaagcgtcgcgctgacgttaattgggacacagttctttacgatagcttcggtcagtctctcattatccggaatgatcggcctggccgtcgggattgattatgcgctgttcatctttacgaagcatcgtcagtttttgggcgaaggtgtacaaaaaaatgaatcgatcgcgaaagccgcgggaacggcaggcagcgccgtcgtttttgcgggactgaccgtgatcgtcgcgctttgcggattgaccgttgtcggcattccgttcatgtctgccatgggattgactgcggcactcagtgtgctgatggctgtattggcatcagtaacgctggtgcctgcggtgttgtcaatcgcgggaaaacggatgattccgaaatcaaacaagaagaaagaaaagaaaagcgccggcacgaatgcctgggggcgcttcgttacaaagaaacctattctgttaagcattttcagcattattcttttatctgtcatcagtctgccggccatgcatttagagctggggctgcctgatgcgggaatgaaagcgaaagacagcccggatcgccgcgcctatgatctgttgtctaaaggattcggagaaggctttaacggcaagctgacaattgttgccgatgcaaaaggggtcaaggggaacaaaagtgaagcatttcaagacgccgtgaaagaagtgaaggacttgcacaatgtggcgagcgtcacacctgccatgccgaatcaaaaaggggactatgccatcattacggcagtgcctgaaaccgggccgaatgataaggcaacgaaagagttagtgcaggatatacggaaacgatcagacaaaaacggcatccgcctgctcgtcaccgggtcaaccgcggtgaacattgatatttcagaccggttaaacgatgccattccggaattcgccattctcattgtcgggtttgcgtttgtattgctgaccgttgttttccgctcgcttctcgtgccgcttgccgctgtcgtcggctttttgctgacgatgaccgctacactcggcttatcggtattcatattgcaggatggaaatttcaccggcttgctcagcattccggaaaaaggcccgattctcgccttcctgcctattttggcgatcggtattcttttcgggctggcgatggattatcaagtattccttgtcagcagaatgagagaagaatatgtcaaaacaaaaaatccggtacaagccattcatgccggattgaaacatagcggacctgtcgtaacagcggcgggactgatcatgattttcgtctttgcgggattcatctttgcgggagaagctacgatcaaatccatgggcttggcaatgaccttcggtgtactttttgatgcgttcattgtaagaatgaccattattccgagtgtcatgaagctgatgggacatgcggcctggtacttgccgaagtggctggataaaatcattccgaacgtggatatcgaaggccataagctgacacaaggcaaaacaccggagaaaccggaagaataaaatgaaaaagcagatcgttatgatctgctttttttatgtgctgaccgcatccatgaaaagagaaaaaagctttttcatgtcttcatgtttttttgtcagcatttcgggatgccattgcacgccgacgacaaataattcacccgtccgttcaattgcttcaatggccccgtctttcgcataagccgaggctttaaacgaaggcgccgtctcttttatgatctggtgatggaatgaattcacccgcgctgaatcgccaaacaaggtatggagacgtgtccctttttcaaaagaaacatgatgggtttttaacggcggatctttttcttgatcatgcttaatgtcagcaaacgaagcgtgtgtcaggtcttgatataaagttcccccgtaagtgacgtttaacatatgcatcccccggcagattgcaagaatcggcttttctaaagcaaccgccgtgagaatcagctccttctcgtaggcgtcccgatcaggaaaggtctttcttaaagcctgtaaaggttcttcaccgtaaaacagcgggtctatatcctggccgccggacagaatgatcccgtcaacatgagagacctgttcctttaaaagcgccgtctcttgaattaccggcaatataaacggcacaccgccggcctcagaaacagactgaatataatcattattgacatatgcccgattataacccgggaaagggccggattgatcagccataatgtttcccgtaattccaatgcgtttggccattcttcgcccccctgaaccatgctcataattaatctgaacgtaggttgtacaaatcagtttgaaattattcttcatgatacgtgagctttccaaaacaaaacccgtgacaatcacgggtttttcattcatttcaatttcttgatctcttccgtcagctctttgaatttttgatcaagctcacgatattgtttatcagccggagtcatgaagctgagttttccgaggacttcctgccgttcggtctcaagcttcaatcgcagttcttcagcatcgtccctgacggagggagattctttccattgttttcggacgctgccgtttgagatatcaagccggatgtccgtcgtcttttcgacaaagtaacgatcatgtgaaacgatgatgagcgttccgtcgtatcgggccaaagtgtcttcaagctgctcgcgtgacggcagatcaaggtggtttgtcggctcatccagaatcagcacatctttctcctccagaataaacgccatcagtttgcatttgacccgctctcccatgctcatcttgccgatgggttccgtccattgcgctgcggtaaatcctaaatgcttcatgagagattgaacatttcctctttcctcgaacgtttctttgtaaaaaagctgttcgggggttttatcaagcgggaggtcgaatacttcctgcgttaaatatccgacgtttgcagacggagaaatccatatgctgccctgcgctttttcctgcccgaggatgaccttcaataatgttgttttcccgctgccgttcgggcctgtaatcgcgatcttttcaccgtgcatcacagtgaaattcacgtttttaaaaagcgttcgtccgtcatatgactttgcggcatcccttacttctaaaaaacgctttcccgcttttttgcggtgttcaatggaaaaacggacttcatactccgcttcaaccggttctgctttcgctttttcaagctctttttcaaggcgcttctgctttgatttaatctgggcgtccgtgcgttttgcttttacgcgatggtattctttaaatccttctattttcgttgattgggcgtgggctttttttgaccaggcgctcagctcgttcatttgagcttcaatccgtctgatcatatgctgctgattctcatattcccgctgctgtgtcagccttctctgtttgcggacctccatatagcttgaataattccctttatgctcaatgagtttctttccttcgatggcccagatttttgtcgccgctgcatctataaaagcacgatcatgcgaaacaaaaataatggtgcctttgtaattcttgatctgatttagcagtatttctaaactgtgctgatcgaggtggttcgtcggctcatctaataacaaaaggctgcttgaggaggagaaacctttagcaagacgggctttcagtttttctccgccgctcaattgtgaaaaggcgcgtgcgggcacgttccacttttctaacaaggctgcctccgcaggttccggatggccggaatcataagcttccgtttcttgttcaaccatatatacgttcacatcttgcaccatctggatctgtccttgtgacggcgctttttgattgcagatcaattgcagcaataaagatttgccggcgccgtttttaccgataacgccgatgatgtcaccttgctgaacgctcgcgctaatctgttcaaaaaggggaacgctgttgatttcataactgatgccgcttaactttaacatttctttcatatgtcaatccctcgcttttaagggaggaccaaaaaaatcctcccaattgatttggaaggattagccgtacctgtgcatgatcaaataagctatttttacatagctttcgtatcgtatagaaaatgggcagactaatcctattttttctgatttgaaatatttgatttcaaacggtcaaaataagattagttaatcattgtccacccatcatcccttcgtatttgttacaaacagtgtagcacacacttatctgtaaaagcaaagggtataagcctttttattccagattggagacttcccactcttcttctaaaacggcataataatattcgtcccaccattcattatcttgggggatgcattttttaaaaaatccttcccgtctcattccgatcttttccatcacccggtgcgaagccatgttttccggctgacatgtcgcaatgatccggtgtaatttcatcttgttaaacccgaatgccagcacggcgcgcgccgcctctgaagcatatcctttgccctggtattccgggtgaaacacccagccgatttcatacgtatgatcgccaaaatactgaaaaaaagcaatgtggccaatgaccgttttttcatccttcaataaaacgggaaacttcccggcatgttcaccgctgttttcagtaacgaatttcctggcatcatcttcggtaaagacaccctctggtatatatttcatgacattcggatttgaggcgtacgcatagacatcctgccaatcttccggttcaaatgtccgaattacgagcctgtcagttttgatattcattttttatgttcctccatcaaaaaaggtttcatttactacttcgattgaaagatgtaaaaacctttgagcggggaagagccgaataaaaaaagcctgcagctatacactgcaggcggttatttttcatttgcggcggcgggcaggtttgtagacccgaattgccctccgacagcttcttttacttcatgaataacgataaatgatttcggatcaattttttgaacatgttttttgattttcagcaattcgttctttttaatgacaacatagataatgcgcttgtctttgctgccgtaatacccgtatccgtaaaaaatcgtcgccgcattgccgtactcggaggtgatggctttggcgatttcttcgtattggtcagacataatggtgagggcttttttattatggaaaccctcaatgacaatatcgacgattttggcgcacagatatacgaatataaacgtatacagcatatgattgatgccgatcgctaaaacggatgcgaaaatgatgacacaatccatataaaacatgcttttggagatgttaaagccctttgtgtaatttaataaatacgccaaaagcgtggtcccgccggtagatccgtcagcaataaagatcaatgccagccccgctcccatcagcagagcgccgaatacaatcccgagcaccatatcgtgcacgccgaacggaataaagctgacgatgctgagaaaaacagaagtcattcccgtaccgagtatcgtgtataaaatcgtttttttcgttaaaaatttataagccagcccgataaaaatcaaatttacaaccagagtcgtaatacttgcaggtatatggaaaagataatataacacgagagcgattcccacggtgctgccgtcccctaaatgattcgggatgacgaaaaattccacggacgccgcaataagaaaggctccggccataatcatcagtatatccttgcaaatgttcttcatgtgcaaacctcctccgcagtcaaaaatatataaaaaacaaaaacgcctcaaaaattatccagcagaactaaataatttttaagacgaatcattcacaatctcgtttgttcattcagtaaagaatgatcagcttcaatatcgaagattatatagacaccttcacatcttgtcaatgccgtgaaaattgatttttctgcagtgtatatgaggtttaaatcaatttaaaacgaggaattatatcagaagagttttcatttctgctctatcaataagagaaatgtaatgagagacaacgaagaagggatgatgacattggaacgaatttttatcagtccggccaaatacgtgcagggaaaaaacgccattgaaacgatcggcggacatctggagggcgttggtgaaaaagccgtcgtcatcgcggacaaaaccgtatgggatatcgcgggccacaaggtgacggctgaattaaagaaaagcaatatctcttctgaagaggcggttttcaacggcgaagcctcccaggaagaaatgaaaagaattgccggcatcgcagaaaaagcaggcgcgactattgtcatcggagtcggcggcggtaaaacgcttgatacggccaaagccgtatcagatgaaataaacggctataccgttatcgtgccgacggccgcttcaacggatgctccgacaagcgggctgtctgtcgtgtattctgaacaaggcgcgttcgaaaactatcgtttctatcataagaatcctgacctggttctggtcgatacgaaaatcgtcgcggaagctccgccgcgctttttagcatcagggattgccgatgcgatggcgacgtggatagaggcgcgcagtgtcatcgccaatggcggtaaaacgatggcaggcggaattccgacaatcgccggagaggctatcgcggaaaaatgtgaagcggtattattcaaatacggccgtctcgcttatgagtctgtgaaagcgaaagccgttacgcccgcattggaagcggtggttgaagccaatacacttctgagcggactgggatttgaaagcggcggcttagctgcggcgcatgccattcataacggatttaccgcgcttgaaggtgaaatccatcacttgacccacggtgaaaaagtggcattcggcacgctcgttcaattggcgctggaaaaacgttcgcttgaggaaattgagcggtatatcgcgttttatatcagcttggggctgcctgtcacacttgaagacatcaaattgaaagacgcatctaaagaggacattatgaaagtggcagaagccgcgacgattgaagaagaaacaattcatgccgcttttgacgtgacggctgacgacgtggcggatgccattatagcggctgatcaatacgcaaaagcatttaaagaaaaacacgcgtaaaaccttttaccgcgtgacccggacccaagggctgttacagcccttggtttttttatgccctttgaaaacttttaaaaataaagaaaaaattatgatacaatatacaaatgttttgagagattgacaaaggaaaggtgggaacgatatgcttcataatccgaccggtaaggagcggcttgcgctggcttttcttctcggaatgcttgcgatactggggccgctcaatatagatatgtatctgccgagtttccctgaaatcgctgaagatttaagcgcccgcgcatcgcttgtccagctcagtttaaccgcatgtctgatcggattgacaatcggacaggttgttgtcggcccgttaagtgacgcgaagggaagaagaaaaccgttattactatgtatttttttatttgcgttgttttctctgttttgcgcacttgcaccgaacattactacattagtgattgcccgttttcttcaaggattcaccgcttcggcaggactcgttttatcccgtgcaatcgtcagagatgtgttttcgggaagagagctttctaaatttttctcgctgctgatggtcattaccgccgtcgcgccgatggtggcgccgatgacgggaggcgcgattttactgcttccgtttgcatcatggcatacgatttttctctttttaacctttatcgggtttttgcttgttctcatcattgcgttcaagctgacagaaaccctgccgccggaaaagcggattccgagctccatcggaaattccgtgcggacaatgggaagcctgctgaaggatcggtcatttatcggctatgcgctgacggtcggttttattcacggcgggagctttgcgtatgtctccggaacgcctttcgtgtatcaggatatttacggagtatcgcctcaggtattcagtgttttattcggcataaacggtctggcgatcattaccggaagctttatcatcgggcgtttcggcggaatcattcacgaaaaaagcctgttgagaatcggcgtgattacagcgatgacggcgactgccgttctgctcgtcatgacgatcattcacggaccgctggcggcgctggtgatttcaattttcatttatatgattacgatcggcatgacgctgacaagcacctttacattggcgatggaaaagcagggacaccgcgcgggaagcgcaagcgcactgctcggcatgcttccgcttcttctcggttccatcgtgtcgccgcttgtggggatgaatgaagcgacggccgtcccgatgggggcaattatgttcacgacatccgttatcggttccatcgcttttttcgccttaacaacaaaaacggagaaagcaaaaaaggagtgaaatgattcactcctttttttgatgcccgttattcatatttcttcagcacgattgccgaattatgcccgccaaagccgaatgagttggaaaggccgatcgttaacgattgctggcggggcccgtctgctacatagtccaaatcacatgccgaatcagggtgctgcagattgatcgtcggcgggatgatgccgtgtctcaggctttctgtcagagcgatggcttcaacgccgcctgccgcgccaagcatgtggccgagcattgatttgtttgccgtaaccggaatatcatacgcaagctccccgaataatgtcttgatggccaacgtttcagaaagatctccggcttttgtgcttgtcgcatgagcgcttacgacatcaatgtcttccgctgaaacattcgcctttttcaaagcgtttttcatcgccaggtatgcgcccgttccttccggatgggaggccaccatatgataggcgtcagagctcgcaccgtagccgagcacctcacaaaggatcggggcatttctgccgattgcgctatccaatgattccaatactaagatgcccgcgccttcactcatgacaaatccatcgcgatccgcgtcaaacggccggcttgccgcggcggggtcttcgtttctcgctgacagcgcgtgggcattgccgaagctggctaatgacaaattcgtaatcgccgcttccgctcccccggcaaacatgatatctgcgtcatcattccgaatggcgttgaatgcttccccgatcgacgtattgccgatggaacacgcggtgacgggagaaagtgaggggccgagcgcgcctaatctgatgctgatttgagcggcggccgcatttgagatcatcatggggacaaggctcgggctcacttttcgcgctccccgttcatttaaagtatgaacattatcaatcaaagtcgtgatgccgccgattcccgagccgacgtacacgccgaggcgttcacggtcaatctgatcgagctgaatcccggagctttcaagcgcctgttccgctgccgctagagcaaactggctgaaacggtcaagccgtctcgcttcttttctgccccatctttcttctgcgtcaaaatcacggacggtaccggctatttttgtctttgagccggagacatcaaatgaatcgatgaaagagattcccgattttccttccgtcaggtgtttccaaaatgtatgcacatcattgccgagaggtgaaatcactcccattccggtgatcacaactcttttcatggtcattcctccttcggtatgtatttattgtaactcgcaattatcctattacaagttgttgattatcctagtataatgaataccagggtaagagaggagagattcggtatgataccagaaggaagattgcaggcgctctcagagtttttaaaaacgcagcgggccaaaatttctccgcagatggccgggctgccgatgggcacacggagaagaacgcccggactccgaagagaagaggtcgcgcaattagccggcgtaagcaccacgtggtatacgtggctggagcagggcagagacattaaagtgtccgcagccgtattggacgccgtttccgatgcgctgcagctgaacaaagatgagagaaattatttatacgcgcttgctattgaggagggcgtgaagcagccgtttaccgcggaggaagaagcggttatcagcccgtcgctttcaaaaatcctgcaggagcttcgttattgtcccaccattatctcggacaggcggtgtcatatcgtgggatggaaccaggctgcggcgcacgtgtttttagattttgaacaaattcctcctgaaaagcggaatctcatagagctattgttttccagaaaagaattaagaagtttagccgtgaactgggagcactttgtgaaaggattcatcgccattttcagaacgtattacggccagtatgtagcggatacgtggtattctcagtttatagaagaaatggagaaaacgtattcggaatttcatacgctgtggaatgagagcgaagtcagctcggcacccgaagtattaattgagttccgccacgcgaaggcgggaaaaatggtctttaacctgacttcatttcaggttcagggcaacagtgatctgcgctgcagtgtgtatacgccggtagatcataccgaaacggaagcaaagctgaaaaagctcttcgaaaacagatgaagaacagaaaaaaacgggaggcggccgcctcccgtttcagtttaaaataaaagcatgagaccggcgatggccggtgttaaaaagatggctgatttcagaatgactttcggcacgaggttggtgaatttcgctccgacatatgcgccgcacatcgttccgatcagcactttgaccaacagcatataatcgacaaatccttccgtcacataaccgagtcctccgccgaccgcaagcgggataatgacaagcatggtggtgccgaccgactggcggatggataagcgcaaaagaatcattaagccgatttggatgaaaggggcagagccgatcccgaacgttccggacaagattcctgcgatgacaccgagtacaacggctttcacccatatgttcagattgctttgctgtccggaatcttcttgtgtttcttttacaataaataaccggactaaaataagcagagcagataaaaacagcatgcccgccgtcaagtaatgcagcaaatctgcggggataagggaagtaagccttgccccgaaaaacgaaccgaatgccgcaaaaacgccgacgatgaggccgatcttcatctgaatattgccttcacggtagtggctgaaagcccccgacaaacttgtgaaagccattccggcaagggaggtgcctaaagccgtatgaatcggtacgtgaaacagtatagttaaaagtgcaatgacaaaaccggctcccccggcgccgataaacccgagaataatcccgagaagaaacataacgagtataataagcacaatcttctcctccatttagatgcctgatcaccatgttccgctccgctttatcaggttttaataatcgaccgtagtccgtcgaccgtcgtctaatatctttatgttacctcaaatttaaggtattggcaagaagccgaattgcttatatacagagggtttacagctctttcaccatcactttttcaccattgaagtccagctctccattgaataagaagccgaatttttgataaagccgcaatgcgtggacgttatcttcaaacaggcttaaataaatccgtctgcaatcatatatttgagtgagatgacggattagggcatcaagcaacagcttgcccaatccccgtccctgatagcgttcatcaataaaaaaacggtcaagccacactctgccgttttcattttcctcatcatattccggaaaccatccgtacatggcaaagccgaccaattccccgttaacataaagaccggccggctgataatgccggcaatcctcagcatcttgtaagcactcttccgcggtttcaataaatgaagtctggctttcccttacatgaagcgccagtatatcggcacggttttcttccgtgactgttctaatttcaatcgtcatacttgatactcctcttccgctttttttgagacggtaaagctttcattacgtaagccatttgtgaatcagccttctctcggatacaatgatcatcataaaggatatggttaccgtatagtcaaggaggcattatgagcgaagacgtcagaaaatacttcacaacgggtgaatttgcaaaactgtgccacgtaaaaaaacaaaccctgttccattatgacgagatcggcctgctttctccggaaatcaaaaaagcgaacggatacagatactattcctatcatcaattcgaactgtttcaggtcatcggtctgtttaaggaggtcggcgttcccttgaagcagatcaaaccgctcttaacagacaaaacccctgagggtatcatcacgcttttaaaagagaaatcttcagaaatcgaaagcaaaatcaaaaagctggagcacctgcaaaggatgattcggacaaaggtgaagctgaccgaacaagccttggagacagatttttcctccgtctcattgcagcgattagatgaagagacacttatgataggacggcccgtactccatttgccagaacggcaatatactgccgccatttcagaattgatccgctatatgcgggtacatgagctcgatcaggggcatccggtcggcggactgtttgcgcgggagcagattctgaaaaaagaattctacaactacacccatttttatatgaagacagaagaaggcatagagaatagagacctccatatcaagccgaaagggctttatgccgtcgggtaccaaataggggatgaagcggaagcggcttaccgcagcatcatgcagtttattgaagagtatgggctggaaatgggcaattatgcatatgaagaatatatgcttgatgaggttgtggcggacgggtttgacaatcagatcacaagaatccagctgcaagtccgcaatcgataaagccgatgccgccgttcatttacgtcttttaacaaaccttgtataatgagaaaaatcagtttgcaattgaggtgaaaaacgatatgtttctagcgcccttatttgaacatgatgtaccggcagcacttctccgcccttaatggaggaaagtgactgcgcttctctccgttagggcatatgacgtgacctaatatgataacggagggtgcatcaaattgaaaaatacattgttcggttcaatttatttggcattggccgccagtatctggggcggtatgtatgtcgttgtaaaagttgtggtagcggtcattccgccgcttgaactggtatggctgagatatgcggtggcgcttctttcgcttttgattctcagtttatttacacgccaatcctggaaagttcataaacgtgatttattactgatcgctgcgatcggattgatcggcaacacggtttcgatcgtcacgcaggaaatcggcacgaaattatcaaccgcgcagatgggtgcgattattacggcatccactcccgcatttatggttgtatttgcccggctgatgttgaaagaacggttaacgctgaaaaaaggaatatcgacagggctggcgacgatcggagtattgctcattgtggggaacggagatctcaatatgtcgagccagctcggcggtctctcgcttctggctgcggcgctgacatgggctttgatgtccgtgctgatgaaacgggttcccggccattactcaccgcttgtcgtcacaacgtattccatttgcgtcgcatttgtcatcctgaccccgtttacagcgggcccgcttcgggagattcctttgtctcagcttgcccggcctgagatatggggcggacttttatatctgggtgtgatctcaaccgcctgcgcgttcatgctttggaatcgcggattgcaattactgaatgcggcaagcggcggtctgtttttcttctttcagccgctttccgggactttgctcggctggctgctgctgggagagacgatcggaggaaccttctggatcggggcggctcttattgtttcaggcgtcgttctcgtcatgaaagaaaaatagaaaatgaaaaaaagccattcagcaaatgaatggcttttttctgttttcccggcaggattcgcccctccataaacagaaaacaaggagcagaaacggatcatgggcaccggtactctcaaggtgcaatatcctgactcttggggtttcgtcaattaacataacgggcggtgaaaaaatggagccaaaatggctagattgggcaaaacagcttcaatccgcggcgcaagcggggctggcttattccaaagacatatatgatattgagagatttgaagaaataagaaaaataagcgtggatatcatggcgcatcataccggcaccgacaaaagggtcatcaaagacgtattcgccggtgacacgggctatcccactccgaaagttgatatcagagcggcagtctttaaagatcagagcatattaatggtaagagagaaaagcgacggcagatgggcgctgccgggcggatgggctgatatcgggatttctccgggcgagaccgctgtcaaagaagtaaaagaggagtcaggaatcgacgtaaagcccgttaaactgttagctgtaatggataagaaatgccattcccatccgccgtccgccgcccacgtttacaaagtgtttatcaaatgcgagatcatcggcggccggatcagggagggaacagaaacaagcgccgccggcttttttgcggaaacggaactgccgccgctatctgaagcccgcaatacaaaaagtcagattgaaaagatgtttgcatatctcaaacatccggacgaacccgtttattttgattaaggcagcaatcagaaagaaaagggggcccgagtataatggaggattcaattaaacagcaggcgcagcggcaatttgccaaaaacgccgcgaaatatgtgactagtccaggacacgccgcaggagaggatttggcgtatctcgtttcagcttccggtgccgaaaagcatatggacgtgctggatatcgcgacgggaggcggacatacggctaacgctctcgctcctctcgtacgctctgttatcgcctatgacctcacggaagaaatgttagcagccgctgaagcatttataaccggaaacggatggacgaacgtgtcattcgaaaaaggcgatgctgaaaagatgccgttttccgatgctgctttcgatatcgtcacatgcagaatcgcggcgcatcattttcccgatgtcagagcctttgttcatgaagcgtttcgggttgtcaaaccgggcggcagactgcttctcattgacaataccgcacctgaaaaggatgaatatgaccatttttataatgacattgagaagagacgggatcagagccactttcgggcgtggaaaaaaacagaatggctccgttttctggagacagccggcttccggattgaatccgctgtctgctttttgaaaccatttcaatttaccgtctggtgtgaacgggcaggcctgactgaagagaaagccgcattactggaaaaacagatgctggatgctcctcgtgatatacagcggtttttttctgtagaaaaggatcaatcagaccgtattgcgggcttcacaggtgaatcggcctgtttctgcgcgatccgtcccgtctgagacgaaaaaaaccgctgtgcagttttcctgcccgcggtttttttcgtattatctgttcttgatttgagaaataatagcggaagtgacatcttccgttgaatgttttccgccgacatcaggagtcagaatgccgctgtttgtgaccgtttcaatagattgtaagaggagatggcccagttcctcttctcggaatgaatcgagcattaatttcgccgtccatatttggcctataggattggcaattccttttccgacaatatccggggcggagccgtgaacaggctcaaacatggaaggatatttgccgtttacattgatgttggctgcgggagcgattccgatgcttcccataatcgccgcgccgatatctgtcagcacatctccgaacagatttgaagcgacaatgacatcgaagcgttccggctgcgtgacaaagaaggccgccagtgcatcgatgtgctgggaatccgtctcaatcccggcgtactcacggctgacctctttaaagatgtcatcccagaacggcatcgagtgaacaataccgtttgatttcgtcgcgcttgtgacgtgtttccgccgacttgccgccagttcgaaagcataccgcatcactctttccgtaccccggcgggaaaagaccgcgttttgtatggcgatttcgtcctcaccctgatagattctgccgccgacagagctgtactcgccctcactgttttcgcggacgactatcagatcaaaatctttcgggttaacgaggggggaagtgattcccggcaggagcttcgccggccgcacattaatcacctgttcaaattcccggcgtatcttgatgagcagcccccacagcgaaacatgatcggggacgagtttttgattccccaccgctcccaaaaacaaagcatcaaagtgctgtaacctttctaatccatcatccggcatcatcgtcccgtgctccaaataatactcgcagctccacggaaaagaagtgaaatcaaaggcaatgcctccatgtaattcggcgatcgcgttcaacacccgctccgcttgagggactgtttctttccccacaccgtcccccggtatgctggcaatcttgtatgttttcatgtttccgtcacctctgaatgaattgttttcggtttacggcagactgtcgaccgtcgttcatcataattccatattacgccacatccgatatgctgacaagctcgggaatgttgcttccatagataaactgttatatgatcttggtaacaataaggcctaaattgtatgaagaggtaggaaagatggataattttaaattagataagccaatcccgtattatctgcaattttattcccaattgaaaaaaatgatatttgacgggatttttaaaccgggtgaacggctgaatgagactcagctggccaaggatttcggagtcagccggtcgccggtcagagaagccatgcggctccttgaaaaggacgggcttctgacggcagacgatcgaaacggctttgtcatttattctttgtccgttaaggatgttgaagagatttataaaatcagaatgtcacttgaatcactggcggtcgaactggttattgatgaagcggctgagagtgaaattgagctcattgaaaaacagctgcgggagacggaagaagccatcaataaaggcgtcaaagagactgagattatttccttaaacgagtcgtttcatcggctccttgtggatttcagccgcaacagccggctggccatgctgcttgagcatgtcaatgtgctgattcatttttgcagagttcttaattttaaaggcgatgaacgtgcggaggttattctgcatgagcaccggaaagtctttgaagaaataaaaaagggcgacaaaacaaaagccgtgcaatatatgacggagcatctcaagcatgatgaagaacatctgaaaggcgtgctgagagcggaagaaacagacgaatcatcacgatagacaaggcgaaatgccttgtcttttttttgccgatgtcatcgaaccgtcataaagacctgacggatgttccttgcatgattttttccgcgtcatttatgatggatatggaagagacgcaaaaaaggcaaaggagattgaaaaatggcgaaacatattctgatgatcaattttcccgcagaaggacacgtaaacccgacattgggtatgacaaaggccttcagcgatcggggcgatcacgttcattatatctcaacggaaaaatacaaaagcagactggaaggagtaggggcgaaagttcatcttcacagcgatctgctcagaatgacacccattgatcccggcagtccgtccggcatacttgcatttttaaaggttcatatcaaaacgtcactggagattttacatattgtgcagcggctggcagaggacattcaattcgacgccgtctattatgataaattcggtgcgggagagctggtgcgggactatctcaacattcccggcatctcttcttcagcatccttcctgttcaatgaagaccgtctgaaaatactgccgctccacccggaatcgggcgtgccgtttcagccggacagggaatgtgaagagctgttggccgagatgaaagacaaatacggtgtcgcccctgacagcatggttcaatttatgaacaacacaggtgaattgaacgtcgtctatacaagcagatattttcagcccgaaagtgagacattcggagatgagtatttatttatcggtccgagttttccgaagagaaaagggcgcgtcgacttcccgattgacgcattaaagaatgaaaaagtcatttatatctcaatgggaacggtgctcggggacacggaagcgtttttcaatctgtgcatagacgcgttctcagattttgaaggaaaagtagtcattgccgccggggaaaaagccgatctgtcgaaaatcaaacaggcgccggaaaactttatcatcgccccgtacgtgccgcagcttgaagtgctggagcaggccgacgtgtttgtcacgcatggcggaatgaacagtgtaaatgaaggcattcattatcaagtgccgctggtcgtcatcccgcacgataaagaccagccgatggttgcgcgccgcctgactgaattggatgcaggctataccgtgcaaaaagatgaagtgagcgctgaaaaggtaaagcttgccgcggaagaagtgctgcataacggaaaatacaaacaaggcattcaagccattaatgaaagctttaaagaatgtacggacatgaaggatgttctcgcccggatcgaccggtttattgaacaaaaacatgctcaataatacatggaaaaagcctgtttcctctgtcaaagggaaacaggctttttataatggcttttagatgatgtgatgttctgcatttgcaagtttcacaagagtcaaaagagattctgcctcacgtgcgtcgagtgtttttgccagacggtctttttcaaagatctgctggccgaagacattcactgacgcctggtcaaccgctgtgtgccagttcttttgtgaatgattctcagaaaaagagaaaacgaacacggtgaagaccgctataagcatcgccatgacccaaaatttttgccgatttcctgctgctgacataggccgcctcctaaacattttactggtattagatcatatatgagctgtttttaacagagtaaagaagtcattatttcatgtagtccaaatgaaacggagcacagccgaaagcccgccggtcaggccgatgagccaattcatattttgttcatattttattaaaagtttatccaagtctgtcctttacagtagatataaccacaaaatgctgctgaaaggagcctttaaaaaatgcatattcatatgatcaacaaaaaccagtttgagagtgacttggaggcggccggcttcagccgtcaggcagatgatattatcggcaaaatgaaagagtacgtaacggaatacgcggcttcatccgaacggttcctgattgaaattcaaaccgtcatgaacgaatacaaagccgtcgtctgcgcgatgttttcgactatggaaattgccggtgcaaataaagacgagaagcatgttgaattcgaagcctgcacagtattgtgtgaataaaagacattcatcaaacctccgcggctgcctgaacggcagtatactgactggtgttccggaaagggaaaatattgaaacttctaaagcggccgttcgtataaaagggtaaatcagcttgtatatggaggttcgtgaaatgaacgaaaagaaaaaacaagcgtttgaacagcttttcagcactttagacgaaagacatgaaataaacggcgctgtattggcagcggaaaacggccgcatcttataccagggttcattcggcgctgcagaactgaaaacaaagaggatgctgaatgaccaatcggtctttgaattggcctcagtatctaagccgtttacagctttgggcgttatcattttagagcagcaagggaagctgcgttatgacgatatgatagagcggtggcttcctgattttccttatccgggcattaccattcggcatttactccatcatacgtcaggattgccggactatatggagttgttcttaacacattgggaccgggacagaattgccgttaatcaagatgtgatcaatatgctcaagcagcataagccggatgcttatttcccgccgggcaaggagtggctttacagtaatacggggtatgtggtgttagcggttattatagaaattgtatcaggcatgagttttgctgaatttatgaaacaagccgtatttcatccgcttcgtatgcacgatacgcggatttataacagaaggctgagtaaagaaaacattccgaactatgcatatggctatgtgtatgatgttcattccggagaatatgtgctgccggatgaacttgaggaaactgattatgtcgtctttcttgacggaattcaaggtgacggaaccgttaactccgctataagagatttatatctgttttatcaggctctttatacggaagaaatcatcggcaaagagtctaaagatcaagcgtttacaccgggctattggaatgaagaagagcaattcggatacggatttggctggatgattcaaaacagcccccaaaaagggaaggttatcagtcacgacggaggctggccgggctattcaactctgatgatccggtatattgaccagaataaaacattcatttatctcagcaatatggaacaatcgtatcaatttgaacaagctgtaattgccgcggctgtaaacatcttatttgatcagccatacgtgattccgaaacgtccggcagatcagaaaaaagcagatatcgatcctgcgatttacagcagatttaccggcaattactcatttcaggatgacacacatgcatcggtggcggtaaaagaaaaccgattgtatcttacaatagacgggcagactccattcgaattattcccaatgacggaaacccgttattttgtcagggcgctgccgcttgaaattgaatttgcaggtgataaagcacaaacagccccgcatttcgttttatatcaggacggcacagaagaaacggctgtgcggatagactgagtgacatgcaaaacaaaaccgccgtcctgagaagacggcggtaatagaaaagtcaaaccccttagatgacgcgaaattttcttttcggctctgacataaatatagaagaaaaaatcatagctccgagcattgtgatgtattccatataaagcgaaacctctgccaaaaccaaccccgcaatcattaaaacagcgcccaataccaccgcaaaaaccttcgttttcatgatgagttccccctattatctgataaatgaattatactgcatctccattaatgtgtacattttgtgaacaatttcacctgatgaaaggcaataaagagagatttgaagaattaggagaaatgacaggccatctttttgttttactgaagaaacgaaagggaaagtgaaaaatcaaaaaggcaaaggagttcttgaaatgaaagcgagactatttttattcagcatgtttctcctgatccccgttctggcgcttgccggatgcaacagccaatcttcaggaggaagcgaaaaagcgaaagacaaagaaacgcactctcacgaagacatgattcactcaggttcatccgaggtgccgaaagatttaaagaaggcagaaaatccgacttataaggtcggcagtgacgtcatgattttagcttctcatatgaaaggcatgaaaaatgcacaaggaaccgtaaaaggtgcttatgatacaacggtttacagtgtgtcttacactccggaaacgggaggaaagcgcgtcgaagatcataaatgggtcattcaggaagagctgaagggcgccggggataaaacgttaaaaccgggtgacaaggccgtgatcgaggcatctcatatgaaaggcatgaagggcgccgaagccgttattgattcagccaaaaagacaaccgtttatatggtcgactatacaccgactgacggcggccaaaaagtaaccaatcataaatgggtgacagaagacgagcttgctgccgcaaaataaaaagaccgcaaaagccgaaggaattcctttggcttttttgcggtcttacatttatgcggattttcttttcaaagcgggtctcgttaaagagaatacagctaacgcgacagcgataatgacaatcaaaccgccgcaccaggctgttgctgtgacagaaccggtttgtccgatcacgccgccgccgatggctgacccgagcgcgatgccgatctgcaaagcggacgtgttgaagctttgctgaatatcggaagactcaggcgcaattttgattaaatagctttgctgcgccggcgcaaggctccagctgagcaatccccagatcaccatcgcaggcaggaaaatgattaaagaaaccgttgtcagcggaagaataaacaggatcagagcgaaagaaacggtcacaagcatgatgcttttaaatgctcctaaacggtcatacagccagcctccgaacgggccgccgcataccgctgacagaccgaacaaaaagtagcatacactgacccaaacggaactcaaatgaagcgttctttccaaaaaaggcgcaaagtaggcatagagtgtgtaatgccccgccaatgtaaacaaggtgacaagatgtgcgctggcaattttggcggtcccgatcgtcttgatctgctcacgaaacggaatcattttttcagcaggtattttttcaaaaaagacgctgataatcagcatggaaacgagagataatacgccgattcccaagaacagaacgcgccatccgaaggcattgctgatgataatgccgacaggcacgcctaaagcgattgcggagctgaaccccatgaaaatgatgccgatcgcccgcgctctgtattcaggcgccacgattttaggagcaatcgttaaagaaaggacgacaatcagccctgtgctcatggaagcgagaacccgtgacaccataagtacggcgaaattgggactgaaataagccaccagattacttaggaagaaaataaacagtgcgattaaataaagccgctttcgttcagcctttgccgtcaccgccaaaagcagcgggccggataccgcgtaaccgagcgcaaacacgctgatcagctgccccgcgctgacgatagatatatctaagtcggaagcgatttgcggaagaataccgcccacaattaattcaaccaatccgactgcgatggtagatgctgcaagcagaaatactttgaaattcatgtacagatactcctttttttattttttagaaaataaaaaatcctgattacaaaaagtgtacgggacaatttttgtaatcaggattttacggttcctggtagacaccctcaaaccatatcattgaggttatacaatgtatgcaatattcggttgtgtccgtttctgcaaaaattctaccataatagtgagggagattccatagaaaattcgaggaaatcctttcaatttcaatatcggcggctgtaacgtcattgatgaagcagggaaaaaaatttatgataaccgtaaggagtctatacagatcaaacattatacagccggaggaaaccgatgaataagtacgaaaaaatcgccaacgaaatgagaaagaggattaaaagcagtgtatatgacatagatcagccgatcccggatgaaaagacgctcgctgcggagttcgggtgcagccggatgacgatgaagcgggcgcttgatacacttgcggctgaaggaatgcttttcagaaaaagagggcacggcacgtttatcattcaatcagccatgcaggatgagcacgttcacgtagtcagcaacgaaattctcggtctgagcaatttgttaaaaggaaaaaatatcaagagcaaggtcatccggtttgaagtgcagtttccgtctcaagatgtcgccgcacatttggccattgatgaaaagactcccgtctattatgtagtgaggctcagaattgttgaaggcgaaccgtacgttcttgaaaaaacgtacatgccggcgagccttatacccggcattaatgacgaggtgctcaaccattccatctacgatcatattacgcgggaactccagctcaaaatcgcaggctcacacagaaaaatcagagcgtgcaagtcggatgatatggatcagcaatatctcggctgccggccggatgacccgatacttgaagtcgagcatgtaggctttttggacaacggcactccctttgaatattcattttcccgccaccgtcatgacaagtttgtcgtgacctcagtcaatataaaacgttcataaaagcgccgaagagtgagagaaaaactcactctttttttgttgccgctgatttacatcttcgcttcttttatgttatattacccaatgatagaatcatcctacaaatttcagaggtgttttgatggagatatccaaaacaagcagactgtcgctcgtagaacaagtggtgacgcaaattgaatcgttaattcaatcggataaatggccggtcgggacgcgcattccccctgagctggatttaatgaagcaatttgatgtgagccgaaacacattgcgtgaggccattcgggcgctcgtacatgccggcctgcttcagacaaggcaggggagcggtacgtatgtcagctcatccagtgttctcggcgcggcattttaccgccatattaaaaaatcaaatttgcttgaaacattagaagtcagatacgcactcgaaagagaagctgcgcgattggcggcggaaaggcgtaatgacgaagacctgaaagcactgaaggcatgcttggatgaatgtgaagcggccttgcaaaatgaagatcgaaaacggtatgccgaggctgacattaaactgcacaaaaccattgtacaggcggcccataacaacatgctttctgatctttacgagcatatgacggaggcgctttgtgcgtcagtccataacctgttggaaatcacccctgctatacggatccacacccagcttgccgccgcgattatcggacagaaaccggatcaggccatggaggccgtcaaccaatacatcacagtatttaaagatacaatacacatggaggatgaacatgaaaattaaagacgaacatcaaattctgcaagcaagtcagcgtaaaaaactgatattgctggtcatcggagtcatattgataggggccaacctcagagcgcctctgacatcggtcgggccgctcgtttcctcaattcgggacagcctcggcatgaccaatgcggctgccggcaccattacgacagtgccgcttttggcctttgcatgtctgtcgccgtttgttcctttattgtcccggcgcttcgggaccgagattgtgttactgtcatcattaattgtcctgacagccggaactctgctgcgctccatcgccggaatcggcactctctttttcggaacgatcctgttgggattgtcgatcgccgtatgcaacgtcctgctgccgagtctcattaaacataagtttcccggaaatttaggcatcatgaccggcgtctactcggtttctatgaatctgtgcggcgcgattgcatccggcatcagcgtgccgatcgcctcttcagcggggttaggctggaaaggcgcgctcggctgctgggctatcctttctttcattgcgtttgtcatgtggattccgcaaatgcgaggacgcgaactgcccgtccgcacgactgggacaaacggagagaagaaaagcagtctgctgcggtctccgcttgcttggaaggtgacgatgttcatggggctgcaatcccttattttttacaccgtcatcgcttggctgccggaaattcttcagcagaatggactcagctcaagtaaggcgggatggatgctttcattaatgcaattctcagtcctgccgattacttttatcgtgccgatcgctgccgctaaaatgaaaaatcagcgctcactcgccggactgacggctttatttttccttatcggcattgccggcgttcttttcggaagcccggctctcactccgctatgggtcattttaatcggaattgcgggaggctgtgcgttcagcttggcgatgatgttcttcagcctgcggacccggcatgttcatgaagccgcggcgctttccggcatggcccagtcattcggatacctgcttgccgcgttcgggccgctcgtattcggtttgctgcatgacatcacgcacggctggacggttccgttattcatgctgatcgcagtctccgttctgatcttcattttcggagtcggagcgggaaaagcggaacagatcaaaacagcataaaaaaacaaagggcccgcttagggtcctttgttttttatttaaaaagctgtctcaggccgtcacgttgtcagttttaagccgatgacaccgatgaggataagccccagagacaccaattgtgacagattgaatttttctttaaaccaaagtatgcccacggccgaaacgccgatgcttcccatgccggtccaagccgcatacgcgacacctgtgggaagaacctgcatcgctccggaaaggcaaaagaatgaaagcataaagcctgttaccatgacaatcagcggccacttttttttaaaaccgtcaatatgtttcatggcaacggctgctacaacttcctcagctccggcaataaataacagcagccatgccattaatgttcaccccttgtttcagtttctttcgtaaataccttcattcctaaaatgccggacaacagcaaagccaaaaagaatatttgcccgattgaaaacgattcgcctaaaatgacgcccgttacatatgtgccgacggtgcctattccgacaaaaacggtatatgcggcagccatcggaatttttttataagagcggatcagcatcagaaagctgacggcaatcagaaggaaaataccaatccaatcaaagagcgaatccgcatgcttcagggcggacgcccaaactacttctaacagtccggctatcaatacaagcagccaatacatgatacagtcacctcagttatgaatgaatgtcagtcatttttacggcggtcaaaaatgatcggtctctgccaatcatttctgcaagcttcttttgagaaagctgaatatttcttttttatatacttcgagatcgacatcctgttcacagccgatataaaaccgttcagccgcgttctcgacaacgttgataatcgttctggctgtccatctgacatgaatgccgctgtggacctcaccctgttcaatggccgtattgatcacgccttccagccaggaataataaggctgataaatggcttcccatttctccattgaatgatcgatggcaagaccggaataacagagaacgataatatctttatgaagccgggtgatgtgaaatgtctcatctaccaaaatgtccagcaacgtccaaaaatcttcagaaccgtccgttttcccttttattctgtccagcgtagtgtcgagcaggttttctgcaatcgcggatatcagtgcgtttttagaagaaaaatataagtaaaacgtaccttgggccgttccggcttttttgacgatttctgaaatggatgctttgtctaatcctttttcagaaatgacttcaatcgcggcttgcaggatcttttcgtattttcccgagctttgttttgccaatagaggggttcctccttttatgaatgactgtcattcattttatcgcatgttcgcttttttgtcatcccttaaaataaaaataccggaaagaagaccatacttctttccggcattcgtcatttatcactgtcgatcatagccttcggcagtcccgtatattttgcccagtaataaataccgagcgaaccgatggcgatcagaatcaggtcaagcggattgctgataatgcccaatccgtggccgaacgagccgagataggagaaaatcagcatcatgacataaaagccgacgatccaccatgctgatttcagctgctgccgtatgctgacatcatctttgggagcatatttactgaaacagagatagatcagaaacatgacaatttgagaaccgagaagccaggatacggtgcgccatccggaccaatatacaatataagaggtaaaaataaacgacagcggcccgatgatgctcatcccttttaaataaaacggtctgttaatattcttcgcgttgactctcagcgccgcagaagaaatcggcgcaatcgcataagacagaatcaatgcgacggagcatacgttgacaagagcgttccaagaagggaacggaagcgtccaaaaaacagccagaccgaacgaaagccaaagggaggcacgcggtgtcccggtttctttattgactttagaaaaaatgctgaataatgttccgtttctggcccaggcatagacgagacgtgaagtcgtattcataaagatatttccgttaccgcccggtgataaaatcgcatctaaaatgaccaatgtcgccagccaccccaaaccgagcaaaacggcgatatctttgaacggaagggagaattcagtcccgatagccggccatccgtgcttcagggtatccgccgggatcgccccgataaaagtgagctgcagcacggtgtaaataatagtagaaacgataatacagacaatcaatgcgatcggaatgttccgcttcggattctgcacttcactcgcgacagccacaatcggatgcagcccaaggtatgcaaacatgacgccgcctgtggaaatcgcggcctgaattccggtgaagccaaaaggcgcgaatccgtgaacggtcatattgcccgggtgaaaatgaaaaatcagtaccacaattaccgtaatcggtacgacatatttaaaaatcgaaataatgaagtttgctttcgcaaaggttttgacactccagtaattgaggaggaagaacaggcagagcagcgcaaattgcaatatccacccggcaattgtcggagaatcggagccttttacggtcaaaccgggaaaccaatacgccacgtattggcggactgccgtgacttctatagaaataagactcgtgtatgccacaatggtgacaaaggaaattaaatatccgacgaggtgtccgtgtgaatatacgggataccggataattcccccggtccgcggcagcgcggcgcccagttccgcataaaccaagccgatcaataagatgattcccccgccgatcagccaggaaaaaacgcctgatggacccgctttagaggcgacgttactgacggcaaacagccatgccgaaccgaatatggctcccatgccgattaaaataagatcaaaaagtgacatagttttctggaagtttccttgcttagacattcgctgcctccttagaaaagacattgttctctttacataattcccattatcattcaaacatacccagccggccggctggaaaattaggacaactttcgaaacgaagtatgtatagcaatgtgctcacattataataacggccgtatggcaagatctcccggcttatattccccgttttaaacacattcaaacctcatattcagaaaaacaaaaaacgcccgaaacaggcgtttttgttacaagttcatatctttcagtccggggctgtgctcattcggaagctcaggaagttccggcacggggaaacctttaggaggctcggacacacttaattcgccgccgtttcggctcggcgtcgttccctgcagaatttctccgatccgtgtcggatccagtctgaaattaaattgggtattatgataacccatctcaacgaatttccggcattccgggtatttttcaatatcataattcggcacgggaaataatttgccccattcgacacccagtgtttccaacgcttttgtaaatgcattttgatgggcgttgtcacggacgatcagaaaaccgagtgtttctctgaacgtctgatttgaactcatttcataaatgcgcgtcttttgcagcacgccggttgattccagcacgacattgtccaataaatcggaaatcagattcccgtggttgtatacccaagacccgttccatggattgccgccggcgtctacaggaagagaactttgcgctccgatgataaaatggtgcggattggcgtgtttaactgcttcgtcaagcggcgcctgatctgccgcctgatttccggggccctcagcgccgctttcgtcgagcagcgcattaatcgtatgctggacaagctcaacgtgtgcgatctcttctaaaaatacaccgcgaagcaggtcacggaactgtttttcttttcctctgaaattagagctttggaaaaagtattgcatcatcgtccgcatttctccgtagtgcccgcctaaaatttcctgaagcaccttggccgcggccgggtccggcttgtccggtttaatgatattgatcagctcttctttgtaataatacataaacagcgccccctgaaagaagttttcggttcttctgttagtgtctttgcaaagtcagtttttatgtatcggcatcaaaaaaaggacggaaagcgtgtccgtccttttgtgttaagcctcaaccgccccgcgaagtttcgtgttgacaagcccgttccatccttgatccatcgtactgtgaatctcggagcttttccgattgactttattgatgacggcttccggctctttccatccgccgtgaatgagagtgaattccgtatctccgctttccgtttcctttaagacaaaagaaacgatccagccttccgtatcccacgaaaaagaaaggcggtacggcgcttcaatatccagcagcttgcacggagacggaccgaacggagattccagctgaaactcactgtcttcttgaggtgtgaaatcattcggcataaaccagagagacaggccgtccgcagtggagaccgtatcccagacaacttgtatcggcgccttgaaaacggcggtatgaataatgtccggtaatggctgattgctgctgttgttgtttttgttatctttgttttgtttatcagacatgatgcgtaaccactctttcgctgtttttacttttgatcatactacacggggcaggacatttgaaaacaaatcaaacttattttatgcttttccaaagccattcaattcattttaaggagacgtagtgatgacagatcaatttaaagcgttagtagtcgatcaacgtgaagaccggttttcagtcagcgtacgggagctggcggttcaggaccttcccgagggtgaagtgctgattaaggtttgctactcaggggtgaattataaagacagcttggctgccattcctgacggcaagatcgtaacgtcgtatcctttcgtgccgggaattgatttagcaggaatcgtcgtttcctcagatgacgcccgtttcaaagagggggataaagtcattgcgacaagctacggcataggtgtttcccgctttggcggttatagcgggatggcccgcattccggcagattggatcgtgccgctgcctgaaggtctgacacttaaagaagccatgacgatcggaaccgccggcttcactgccgcattgtccgtccagcgtcttgaagaaaaccatgccgctcctgaaaaagggaaggtgctggtgacaggagcgacaggcggcgtcggaagctttgccgtctccattctttcaaccttaggttacgaggtcgaggccagtacgggaaaagaagacgaaagcggctatttgaagagcctcggagcaaagacggtcattcaccgtgacgaagtgtataacggcacgttaaaaccaatgcaaaaacaaaaatgggcagcggccgtcgatccggtcggaggtgagccgcttgcttcagttctcagtcagattcagtacggcggatcagttgctgtgagcggactgacagcgggaacgaaactcccggctacagtctttccgtttatattgcgcggcgtcagtctcttgggaatcgattccgtattctgtccgatggagacaagaaagaaaacatggcagcgtttagctgatgacttcaagcctgcagatctggaggcctttattcaaaaggaaattacacttgaagagctgccggatacgcttcctgctcttttaaaaggagaagcgagaggaagaacgatcgttacaatcaacgaagaataaatcaaaaacccccaactgctgattgggggttttcaatatataatcaattttttatcgaaaagagattaactattgatcatatagtgaaaatgagttgattaaaaacataaattgattacatataggtaatataaaggtaagttataaaattttctgaaatatttattgactgaaagcgcttttaaaattatgataataacataaatgccaataatatcattataacttcactacaaagtaactataaaataacaatttgacgagaggggagagtggataatcactataaatgataacgctttcaaattattttcttcttatataactgttttggacggtcagaacttgtatgcagacgttatgggtgcaaatattgataactgaatattccgatattatctctgtgtaaaaactaggaggatttgaagatgaataaaaatagcagccagcattcatttttgagaaccatcattttagtatcgacattcggggggcttcttttcggctacgatacaggtgtaattaatggggcgctgccgttcatggcggaagctgaccagcttaatcttactgctttgactgaagggatggtggcgagctccctgctcttgggggctgcgatcggagcagttttcggagggagattgtcggactataacggcagacgtaaaaatatccttatccttgccgttttgttctttgcagcgacgcttggatgtacactggcgcctaacgtatctgttatggtcatctcccgttttctgctggggcttgccgtcgggggagcatccgtaaccgttccggcgtatttggctgaaatgtcgccggcggaaagccgagggagaatggttacccaaaatgaattgatgattgtaacaggccagctgcttgccttcacgtgtaatgctgtcatcggcaatgtgcttggtgatacctctcacgcctggcgctatatgctcgttatcgcggcccttccggcggtattcttgtttttcggtatgctgaaagttcctgaaagtccgcgctggctggtttctaaaggaagaaaagaagatgctctgcacgttctccggcgaataaggaatgaagagaaagcgaagtctgagctcgctgagattgaatctgcctttcataaggaaactgagatggagcaggccgcctttaaggatcttgccgttccgtgggtgcgccgcattgtgtttatcgggatcggaattgcggtagtgcagcagctcaccggcgtgaattcaattatgtattatggaactcaaattttaaaagatgccggtttcgagacaaaagccgcattaatcggcaatatcgctaacggtgtgatttcggtgctcgcgacttttgtgggaatatggcttctcggcaaagtcggccgccgcccgatgctgatgacggggctgatcggaacgactgcggtgctgcttttgatcggagttctgtctgtcgtgctgaaaggatcgcctgctcttccttatgtggttctttcattaacagtcactttccttgcgtttcagcagggggctgtctctccggtgacctggctgatgctgtcggagatattcccgcttcgattgcgggggcttggtatgggggtcactgtcttctgcctctggatcgtgaacttccttgttggtttcacttttccggtcctgctcgcaaacatcggattgtctgcaaccttcttcatttttgtcttgttagggatagcgtccgttatatttgtgaaaaggttccttccggaaacgaaaggtctgtcgctcgaacagcttgaacaaaacttccgtacttatgaaaaaacagatcgtaatagcgcagaagccaaggtgagcgggtaatctggatagacgcggggttcctaggaatcctgcttttttatttattatatagaagggaataataagtgagaaaaaagtttcgtaaaagtgttgacctaatttgaagtgcatggtatattattaaacgtcgctgatgaacaaagcgaaaacgacaaatgagaaaatgatcttttaaaaaaagactttacaaattctcaaaagcgtgtataataaatgaggtcaagaaaaagacttcgaaaagaaataaaaaacacttgacatcataactgattggtagtatgatagttaagtcacctgataagcgcccgtagctcaattggatagagcgtttgactacggatcaaaaggttaggggttcgactcctctcgggcgcgccaattcaaacgcgggtgtagtttagtggtaaaacctcagccttccaagctgatgtcgtgagttcgattctcatcacccgctccattataatgatctttgaaaactaaacaagacaaaacgtacctgttaattcaaagttttaaataaatcgcacagcgatgtgcgtagtcagtcaaacactttatcggagagtttgatcctggctcaggacgaacgctggcggcgtgcctaatacatgcaagtcgagcggacagatgggagcttgctccctgatgttagcggcggacgggtgagtaacacgtgggtaacctgcctgtaagactgggataactccgggaaaccggggctaataccggatggttgtctgaaccgcatggttcagacataaaaggtggcttcggctaccacttacagatggacccgcggcgcattagctagttggtgaggtaacggctcaccaaggcgacgatgcgtagccgacctgagagggtgatcggccacactgggactgagacacggcccagactcctacgggaggcagcagtagggaatcttccgcaatggacgaaagtctgacggagcaacgccgcgtgagtgatgaaggttttcggatcgtaaagctctgttgttagggaagaacaagtgccgttcaaatagggcggcaccttgacggtacctaaccagaaagccacggctaactacgtgccagcagccgcggtaatacgtaggtggcaagcgttgtccggaattattgggcgtaaagggctcgcaggcggtttcttaagtctgatgtgaaagcccccggctcaaccggggagggtcattggaaactggggaacttgagtgcagaagaggagagtggaattccacgtgtagcggtgaaatgcgtagagatgtggaggaacaccagtggcgaaggcgactctctggtctgtccatatcgatacttgtgctctcggcacaacgtgccgatttgtttttccaaatggcgcttgggatgatccttcatcagattcttcttccaacgataataagacgctcgagagatacctaaatgaatacagatatcctgtacggtcattgtgctgtgcaatatttctacaagttcgactgacgtttcgctatcaacttcctttccaattcgttgtacttttttaaaacttcattctgttgtctcaggtaacgaatctctgcctgcagtttctctaaatcggaagaatactccggaccttttccgtaagtgtattgctttccaacaggctgttcgaatcgatgtgtatcaccagccttataccatctaacccatgtctgaacctgtgtcttattcttaatattcaactcctgcatgatctctttcataggtacgcctgccaatctcatttctacagccttctgtttcgcttcaaccggataactcactcttgtccccatagaaaaaacacctccaagtctaatttcggataacaacgatccgttttcaaacttgaaggtgttttttgtttgtctcatattatggggtcagtcccacgattgtcagaggttttgttgattattttgcttccagcctgcggatgcgctcatcgagatcagggtgtgtggagaacagtgacgaatgcttcttgccgttaatttttaacgtctgcaccgccgtctggtcctcttcattcacatgtcctgtataagacttcagcgtacgcagggcgtgaatcattttatccttgccggcaaggtctgcaccgccgcggtcagcgtgaaactctctatggcgcgagtaggcgaagacgacaagactgccgagaatggaaaagataatctgaaacacgatcatcgcgataaaatgaacgaccggcgcgaggtcttctttgacaaagcggcttgcaacccatgccgcgattcgggaaaggaatacgacgaacgtattgacgattccctgcagcagcgtcatcgtgaccatatcaccgtttgtgatgtgtgcgacttcatgggcaaggaccccttccaccgcagcatcatccatctgctgcaataaacctgaagaaaccgcgacaagcgaacggcgcttagaaggtccggtcgcaaaagcattgacctccggggaatgataaatgccgacttcaggcattttcgtcatccctgcggcacgggacaatctgtgcacgcggtcaaccaattgctgttcttcatagttgagcgactgtttcttcggatttaacacccggacgcccatcatcgttttggccatccatctggacattccgagtgaaataaaagaaccgacaaaaccgacgacaagactgaacacgagcaatgccatcagatcaatgcggccattttgtatatacgagccgacaccggtaacgcttgtaataatcgtaagcacaattccgattgtcgtaatgaccaaaaggttcgttaaaataaacagaaatattcttttcgccataattacctccgtcttttttaagatcaaaagaacttatttacttaaattataaatgatctgtttgaaaatgcaacaatttcgacgtatgatgttaatgtaattctcagtgatattaaaaaaagtgaacacgtaatcaatcagaggtgaaccatgaacacgtttaaactgacccgaactgatatggtccggcttctttacgcgctaaaaggccaaggagacgcaacccctctccaaatcttattgcaatcagcggatatgaccttggatgaagcggaaagccgtctgcatatccctgaatttctgacgagattcgaacgaaaaaaagagaaaaaggagtacgggctttcaactaacgagattgtcgagctgggaaatctgtgcgagctgacgtctttaaaatcaaccgccgtccaaaactgggtgaagcgcgatattaaagatttaatcggccaccccttactcggcaaaaaatatacaattgaacaagctgtcatccttctcattgtacgtgatttaaaatcaatttatgacttcgaacatatacgcggcatattaaaaatcgcttttaacacgatcacagacagatcagacgacgtcatcagcccgatcagctactatgaaagctgcgcccaagtgattgattatcttcatcataaggcaaacccgccgatgaaggaaacgagcctgcaggagctcgtcgaagagcagacggacaagctcaaaggctgctttaaagaactcggaagcggacaatggaacaatatcagatccataatcgccgtcacggtgctctccgttttgactttccatattcaagcctcagcctacaaaatgaccagccatttattataattcataacgcttcttcgccccggtgtctgcgccggggtttttttgttgtacaacaattgccagcataatcaataccgttccgtttgaaactaaaacgcgaaaacacatcttgccagagaaaaggagatgaaaaagatggcgagcagaaataaactcttagttccaggggctgagcaggcacttgaccaatttaaatacgaagtggctcaagaattcggcgtgaaccttagctctgatacagcagcacgcgcaaacggctctgtaggcggggaaatgacaaaacgtcttgtacagcaggctcaatcacaattaaacgggaaaaatcaataatgcagcttattcgccgggacttctcggcgaattttgatatttatcggcattctcctttccgtgccggtagccgttcggattccttcggtctgacgaatcttcatgatgccgataggattcccaatgttcattgcgatcatgattccagtaatgattgtaatacttttgcttaggctctttgtcatttccgttttcctgaggattttgtgttgggggctgctctgtttccccatcttgttccttctgtgtgttttcctctgatccggaagctgcatttttttcggtttgctgattgccgtcctgactgtccggcttcgcttcttccgtaccgggcgttgtttcattgtttcccggcttctctgctgccttttcttcatcaggagctgtcttttcatcaaccgccggcttgtctgtgtccggctgctcgctttgatcagcgtctgtttcggtatctttttgatctgtttcattgccgtcggtctgcttttcaggctgtttttcttctgttttcttttcgtttcttcttatgtagctgcctgttgacatcccttcctgttttgctttttctcttgtttccatatcagattcaagcgattggacctggtaggtgcccttatatttttcagtcatgtcgtccagctgttttttaacgccttttttatatgtattgtcatctgtattttcataaaccgtggaaattaaaatctcttttgattcctttacatatccatgcttgctgcaatcggtaataatattactgatgacttccttaaaatcgctgcttttccaatctccgatgtcactgatgacctgtttggcgtcatggttcagcggtgtcagttcaatgacttcatatttgctgtttaaagccatttcaatgctgggattaatgtcaagcgtcatatacgcgtaagctttgttatcagaaaaaaccgggagcaaaattaaaataaacaaaataatagcagtcatcgtaaatactcccaatttaaaagggcgcagtttcagaaaatcaaaaaagctggcccttcttcccatacgcgtttcgccttcgaacgtaatttcctctccgatttcacaagtgcggtgatcattttttgtttttaaaaattgtccgtcaggggttagcaacgtgacgaattttttatttttctctactatgatccctcttctcatgagtgcaacacccctttaagataatcttttaaataaatataatcaccggtaataataatactcatggcgatgatatattttcggttccgttcgatcgtttttctgctgaccgacacgagctgctccagctgcttgacaggaagctgttttttctggtgcaaaatggacgccagctcttcattttcaacaagcgtgtaggctaccttaatcgcattctgcctcgcatctgtatgcttcggcgattgttccagcagctctttaaaagacaggccgtattctttcagctgcttctgaaaaaaaagaatttcttcccggcgctgttcctgttctatctgtttgcggtattcatcaatggaaagctccgcttcgataaggctctgcgaagattcctggtcgtcgccttcctgcacatccatattgatatgctgagcggttcttgcttcttttctgatataatctatcacttttctttttataatcagctctgcaaatgcaagcagcgaattacctttttcagccgaatatttttcaatggcttcgttaaacgcgatcagcccgatgctgaattcgtcgtctttttcatctatatatcgtttacaaacggatgaaaccgtcttcgcgataaaaggcttatattgctgtattaaatcgttctgcagatctttgtcgcctttttgtattttttcaacagatgtttcaagcgtttgcttcttttttcccaatttaaacaaaaggctaagcactggtttcacctcagttcctccctataactactcataatcatagctaatttagtagggattcgcaaaggaagaaaaagagaaatcgatttcatttgtctcaattatgacaagccaataagacgtactatacatgatttcgtgcccccatgcagaattaagggggttttctctgtgttttttgtaacaatgctgttataaaattgttatcatatgtcttaaatgtaagcgtttcaaacaaaaaagggaacctgctttttaaaaagccagactccctttttgatcattttacgcgtgttctcttttttccgattccgcgccagactctatttgttttgctcctgacataaaccatccgcaaaccgcaatggtagccagaaccgcccagaaaatgattttccaggccgccgaatggatgacatctgccggaatgataccgagttcctcatgggccaatgtataaagagcgagcttcacgcctacccatccgacaatcacaaatgccgccgtttcaaggcccggcttggtttttagtaaggatacgaacattgatgcagcaaaacgcataatgattaaaccgattacgccgccggctaaaataacgagaaactgaccgccgtccaagccgccgatggcaggaagctgagttcccgggagcgttacggcaagcgcgaccgccgctaaaatggagtcaacggcaaaagcgatgtccgcgagctccactttcaagactgtctgccaaaacccgctttctttctgcattttttgaccggcgttatctttaaatacataccgcttcagcaaatggctgaccgcaatgtaaaacagatataaagcgccgacggcctggacctgccaaacattcaccagaaaagaaatggcgaacagcgacccgaaacgcaaaataaatgcgcccgccaatccgtaaaataaagccttcttcctttgtttttcaggaagatgcttcaccatcacagccatcaccagcgcgttatccgccgccaaaatcccttccagcccgattaaaacgagaagaacccatccatactccaataataatgcaaagtccaatccattccctccgtttcttttttctatcatccgagcttataccggcggttttttacgcaaaaaagacctttgccgatataaggcaaaggtcttgctagacatgaatgattggcatgccaacaaagccgatggatatgatccatgaattgacgactttgtttccggaatatccggacgctactcccctttgggatttcaagaaatatttgtttatacgctcatgataaagcctgtttcatcatttgtcaacgcttaacttttttaacaaattgagaaattttttctgttttggcccgctgttttcttctctttaaaaacatccaaagaatgagaagcaacacaatgaatataccgagcggcagcatatattgatcgagaatggaaccgacgcttttccaattttccccgagtttcattccgaggtatacgtaagcaaatgtaatcggcagcatcgctgcatatgtatatagagagaacacccagacattcatcttcgcaatgccgcacggtaaagaaatcagcgtcctgacccccggtataaaacggccgctgaacgcgaccaaacctccgtgcttctgaaagaaatcatctgatttctgcagggattcgggttttatccatatatactttccatatttcagcaaaaacggccgaccgcccagcctgccgattccatataagacaagcggacctgaaacaccgccgagcgaaccggcaaacacggtcccggcaagcgtcatatccccttttgagacccaatagcccgcaagcggaagaacaatttccgccgggatgaattctatactgagcgccaaaaaaattccggcgtaagataagcttttaaacgcttcaattattgatatgatgaaatcttcgatgatctatcactcccggcttacgtctatattccgaaacttaagaatgattttaacacaaaaccttgagtctgaaatatcttttagacatgcccgttataaatgtgagtcgtttcagatcggtatagcgggagggaatgacatgcgcaatacaacgtcccgcctgtctcctgattgcttgtctggcggcggttatatcacttaagttctccggaaaaattacccttcgcggtaagcggcggctgaccgcggattcagttcatatgggagcgggaaattttctcagtcactacatgggaatgcggggcatttcccggggaatgattttgtataatctttttgattaccactgatggttttcagggacttcagcgctttaaagaacttaccgattcactaattgtaaataaagaattcatttccttttcagccgaccatttccgcctgaggaaatggaacagcatacgctccatgaagcgccgcatcacccataagttgctacacatggaacggacccgtttatccacaataaagacaaaaaggagtttttattcatgcacacgatgtggaagggttcgatcagtttcggcctcgtcaatatcccggtcaagctcttcgcggccactgaagataaagatataaaattccgcagtcttcataaagaagaccatgcgccgattaaatacgaaaaaatctgcaccggatgtgaaaagagtctggaacctgatgaaatcgtgaaaggctatgagtatgtaaaagggaaatacgtcattatgacagacgaagacttgaaagacgtaaaacaggaacatgaagaaaaagcggttgagattgttgactttgtccagctgcaggaaattgatccgatttattttaaccggtcgtattatgtcgggccgggagataacggcacaaaagcctatacacttctgcgggaagcgctgaggacgacgggtaaaatcgggattgcctccattacgatccgctctaaacagcagcttgcgattcttcgcgtgtatgacaactgcatcgtgatggaatccattcattatccggatgaagtcagaaatgccggacatgtgccgggcgttcccgagcagacagccgttaatgaaaaagagctgcagacggcgattacgttaattaatgagctgacaaccgagtttgacccggaacaatacgaagatacgtaccggaaagcccttctcgctaaaattaacgataagctcgaacatgaagaagcgggcgtgacaccggctgctgccggcccgcgcgaagatgtcatcgatcttgtcagcgcgcttcaggcaagcattgaccggacgaagcggccggatcgcgaacaggctgcaccggcgcggccaaaagacgccgcgtcagcaggcggcggaggcaaaaagcagaagacgaccagacaaaaagccggaacgtcttaatcatggtgctgacgatgcagccgattttgacctctgtaccgcctgaaggcagtgagtggcgctatgaggtaaagtatgacggattccgctgtcttctccgcatagacgaaagcggcgttacattaaccagcagaaacggacagacgctgacgaatcaatttccggaaatcacggtttttgcggcccggtgttttcagcacatgaaagacaggttccccattacgcttgacggagagcttgtctatttaatcaatccgtacagagcggactttgagcatcttcaaatccgcggacgtttaaaacggacggaagcaattgaacgcaccgctgatagacggccgtgccgctttctggcatttgatctcctcgttctggaaggcgccggcaccgtctcattaccgtatgtgaaacggaaacgcgccctttccaaactgcttaaagaagcaaatcttcccgcctgccctcatcacttagcggaagaagcgattcaatacattccggaacacactgaatttgatgcgctttgggacaaggtcgtccgccatgacggagaaggtatcgtagcaaaaagggcttccagcggctgggcggaaaataaacggtctcccgactggcaaaagtataaacatatgaaaacggcacatgtgctattaaccgggtttaatccgaagaacgggtatataacggcctctgttttaaaagacggcaccgccgtcccgatcgcgtccgtttcccacggcatgcaggcggaagaaaaaaacgccgtcagaaccattatggagacccacggaaaaaaacaaaaaagcggcgagtatacacttgagccttctatctgcatgaccgtgcagtatttaaccatattgcaggacacgctgcgtgaagtatcttttgtgtcttttcagtttgaaatggattggacggaatgcacgtatcagcagcttatcctccgctctaaaacgctgccgccgaagctgcagttcacaagcctggataagattgtttttaaaaaacgtgaaaaaacgaaagcagatttccttagttatatggtgaaaatgagcgattttcttatgccctttcttaaagatcgggccgtcacggtgatccgttatccgcacggcgcgcctggcgaatctttttttcaaaaaaacaaaccggactacacgccggactttgtctcaagcgtgtttgacgggagccacgagcacatcgtatgcagcagcataccgtcacttttatggctggctaatcagctggcgcttgaatttcacgttccgtttcagacagtgcattctgaaaggcccgcagaaatcgtcattgatcttgatcctccgtcaaggaatgattttcctatggcagtggaggctgcgcatgtgctgaaacagctgtttgactcattcagcattacgtcattcccgaagctctccggaaataaaggcattcagctctacatcccgctttcaccggaagcattcacctatgaagaaacccgtgcgttcacaatgctcatcgccgattattgcgtcaggacgcggccggatctttttacgacagagcggtttatcaaaaaccgaaacggcaggctctacctagattacttgcagcatgccgaagggaaaaccattatcgccccctattcgacccggggcaacgaattgggaacggttgcggctcccctttattggagcgaagtcaactcctctttaacacctgatgattatacgatcgatacagtagtgaaccgcgtcaggacagagggagatccgttttatgatttttaccggaatccgcaggacggcccgctttcaatcgtgcttgagcaaatcaagagaaagagctgacgctttttgtcagctcttttcagtctgatacgtgcacatcaatttttctttggaaataaataaatagcaggagtaaggaatgtttctgagggtgagctgttttgcagtaaagtataaaatgggaatatgggccgctttcttaaacagcctgtagcagccgctggacggttttatcacatcaaaaccgagtctcgccgctcctttatgaagcattgtaatgccgacgactcccttaatctcgtctttccgtttatgctggttaatataatccgctaaatgaggcatggattgatataccttctgatatagcataatcccccttctgaccgcgctttcaataggctgcagctctttcaggagtttgacattatgaagatgaatcttaactaacacgtcgttttttttaattctggttccgtcgctcaggatgacatcttttcctttatatctagtcaaacggacgcggaatacattcgattgccgtttatcaatcagcgtcagccgggtaaagaagaaataaagcggatcaagtaagtaccatatagacagcagacagcttctcacatgttcaccttctttatattcaaagcaccctcatattttggcatggggcatgtcacattatgattggtaaataatgatgccgacctgtatcagcttatgcaaaaaccgcttcaggctctactgtccggaacagaaaaaaacactcttcgtgaagaagagtgtctgtatccgctttcttttaacggaaaagcaaatgctggctgtgaattcccgcttttttcagtaaggctatcagctgttcctgttcctcaggcataagtcctgaaaacgctctcgcaattctcaatgaatgaatcggataaattttatccaaatactcgtttcctttatcagttaaatgggcgtaaacagaccgtttgtccttagggtcttgttctctgaccaaaaacccgtttctttcaagcttgtcgatgacataggtgacattcccgctgacaagcaaaagacgcgacccgatttgctgaagcttttgcggtcctctcgtatagagcagctccaaaacggcaaattcagtcggattaaaaccgtgttctttactgtcgcggatgctgtgttcagacacactcttgaaagcccttgcaaaaactttgtacaaattcatcgaacgcatcacttcttcttcgttaaatgataatctcatcatatctaccccgtatttaagatttttataaaaaaataatgtaaacccttacaattcataagagtcgttctttgttttatattctattcgtgccgtttttcagaattccttcttttttatataaaaaaatacccttatacatcatttaatttgtataagggttccgttctttatagggaatgttccgaaaaaaatacgcgtattcctttctcagctccgtaattgtcatggaattgagtatttctttcgtatagactccgatctgcagaagctttttggaataatggtttctctctttgtccaatgcattttgaagcaaacgactcatggcagcctcctttgttttccgttattctatgatgagaataacgcttttatatcaaagacgtataaagccattgtaaaacttctgtagattatgatgtttttcggtaaagtccgttctgaacggctctgagcagcggaaaagcgtgttccccggcaatctgcatgaacgcctccagcatttcatcacgtttcatatctaattcaatgatttcttttgccagcgaaaccgctttttctttctccattcctatccttcctcctcattgtgtctgtacagtaagcataaaacggggcacaggaccatgcattaaccttgtcaatttttctgccgctttttttctaaaattttctattccgcgtcagaaaacctgacaagcgtcaggttttttctctttttttcttatataatatgagtaaaagacatccaggggtggaaaaatgacgacagacgaacaatcttacaaagataaaaaagtaatctcgatcggcattgtaagcgaattaaccggattgtcagtcagacagatcagatactatgaagaacggaaattaatctatccgcagcgttcatcacggggaacgagaaagtattccttcgcggacgttgagcggctgatggatattgccaacaagcgggaagacggcgtgcagacggctgagattttaaaagacatgcgaaaaaaagaacaggctctcaaaaacgacccgcagctccgcaaaaaaatgctggaaggacagcttaatgctcattttaagtataaaaaccgctgatcaaaaaagtccgcctcctgtgagacggactttttttataaagcatgaagaaatgcagttgcaatgccgaaataaattaataaggacaaaatatcgttcagcgtcgtaatcagcggtcctgatgcaatcgccgggtcaatgttcagtttatgaagaataatagggacgatcgttccggccatcgtaccgataatcaacgttgcaagcagcgatgaaccgacgacaaaaccgagcgttaagtctttctgccagacggttgcgacaatcgtaatcgcgatcgcacagacgatgccgatgtagataccggttcttaattcacggaaaatcagtttaaagatggtttttttattcatttcttctttagccagtcctctgatgacgacggcgagtgactgtgtgcctgtattacccgtcgttcccgcaatcattggcatgaaaaacgcgagggcgacgactttttgcaatgtatcttcaaaataattcagaatgcttccggaaatcaatccgataaacaaaagcagaatgagccacggcaaacggcggtacgccgcaacgtacgctttcgtatcaaatgtaatcgccttaccggaggctgcgaatttttcgtaatcttcatcggcttctttaatcacgacgtcaataatatcatcgacagtgacaataccgacaagcacatgattttcttccacgatcggaatggctaaaaagtcataccgctggatcagccgggcgacttcttcctggtcttggagcaccccggccgagatgacacgcgtaaacatgagatcctgcactttatcctcaggctcgccgagaattaaatctctgtaagagagcactccgacaagctgcttgctgtcattaattacgtacaaataatttattgattctgcgatttctgcaaagcttttcagcttcacaaccgcatcttttactgtataatgctgcggaatccagacgaagcggttcgtcatcatccgtcccgccgattcttgcggatagttcatcaaaagctgcacggcctttgattcctcagcctccatgctggataaaagctgttctttcagttcttcatccatctcttccagcaatgcggcgagatcgtcgttatccattttattcattgcgagagtggctttcgttttaccgactttatgcaaaacggcaagctgaaattcccgctccagctctccgatcatgtcggtgatgtcatcaaccgtcatatatgacagatagcgggcccggtgcttttccggcatttctttaaacaaaaatgccatgtcatagggctgaagctcatctatcatgtttcggaattcttttatttttccgtcccgcaataaaatgataatgcgtaatatgagttcgtcataggtcatgttttggaccatcgggactcgtacctcctttacggagacgcgccgtccgtcaagggaagtgcggcggtttgtctcctcatcatgtcgtcactggttatctggctgtatatgggtacttcttctgacatactcgaatggggagaatccatactccgcacctccttatcatgctcagtcgtgtacgttttgaggcataaaaaaaaccttctgatatgaaggcgaaaacaagcacggcaaataaacgtgcggggcctccaatcgtagagctttagcactgtatggcataggacagccatccagctgcgttaagaatcaccttatgtcgatgattcctgttgacccattggcgtctttggacatttttgggcagcagcgtatctccatacaggagcctcacctaacgaagttcttatttgaattgacacactgagattacagaaaaaaaaggaatgtgtcaaccttaaatttgtgatttcagcacatgcctataaaataatcggaataaaggcataaagcccttattccggcaaatcgctttcatcctcttctgaaaggaaatgataggattcatgcagcatgagcgcgtactccccttcttttgtcggatgcggtacatactcagcctcgttgatatactgctcttcccttttcttcatatgacagacctcctgttcaattttagattgtccaaaagaagacccgttatcataggaaaaaaatcacttgcggagcgggacatgcagctatatttttcggatcgtgaaaaagttcctaagcagccacgggcccggtttgaaaccgagcgttaattgccacgcgccgatcgcctgcagtccgaactcccgaacgagaaccattttttcactcatgctccgcacatcctcaaaccacacttcatgcgttcttccattttcatcagtataccggaagtaaggggaacgctcctgctgggaataacggatcactgattgatgcttcattgccgtttccatggcgcgctgattggagatggcggatccgatcgttccgggacggtacggaatcacccaatcatacccgtacagcggaacaccgagaatcacttttcttctcggcaccctgctgatggcaaaattgatcgtttgcctgacctctgtcaaaggcgccacgggtcccggctcactgccggcgtggtgccagtcgtacgccataatgaacatataatcgacgacggttccgattccgccgtaatcatatcccctcagccacggcactgcatcacttgttttcgccggaaccgatatcgttaacgcgagctgatgctctgaaagccgggtttttaactgccggagaaatcctgtgaagaggtccctgtcagcttctctgacccgttcaaaatcgatatttacaccgccgtacccctttcttacggttaaggagacgatattgttgacgagattcgttcttgccgtcggattttgcagcacttgatgggctaattccggactgaatcccccttctgtcagattcgtaatgacggcaagcggacgcactctgttctgccatgtggtttctattgcggttctgtcgtttaaatcgttaatgatatctccattcgggccaaaatgatattcaaacaaagaaatcgccgaagaatacggcgcaaaatcattaattagctctctatccgcttcaggcgtccgaatgacataaaattgcagggttcccgcaagatagttagagatatcaggaatcttcactttcatacccgcccgcagccggttcggcggaatatccgggtttgcctgcatcagctgcatctgcggcacataagccttacctgcgataacggcatacgtatcattcggctgaaccgtatattcattaagagggattaaaagcgcctgccccggaacgatattcgtttcctcaagcccgttgacgcttctgatgctgtcaacagggtatccgtactttctgctgatggaaaataacgagtcaccagactgcactgtatgaacaaacatagatgtcctccgtttccttttgatcaaaagggctcttcttatctttatgaatgatcatccggtccgattccaaactctgttggagaaaggctgtttacaaatcagacatgatcaactatgatgatgtcatcataaaaaactgtataggaaacgcactaggggtgctgttatcggctgagataaaacatgcggcaggcgtgttttgatcccttataacccgatctggataataccagcgtggggaagtgcagattgaccggagcgcagggtttttccccatgcgttttcgttctgctgctgcatattccctcggatatgcagttttttatttttcattaaaaaacgggggaggacaccgcaatatgaaactgaatataaaccgcctgtaaaatcaactctttcatacatacgactatccgataagaaagcaggagatcagaatgaaaaattggaaaatgagagaaattgtcgtcatgtccgtcatcagtgttgtatttgctgtcatttatttagtatcaactcatgcaagcaatatagcggcaggatttttcggccggatgagctacgaaccgatttacggtatctggtttatcgtctcggtgattgccgcgtacattattcaaaaaccgggagtggctcttgtttctgaaatcatcgccgcgtttgtggagtgcttactcggaaatccgtcaggaccgatggtgattctgatcgggatcgcacagggaatcggtgcggaagcggtcttttttgcgacacgctggcgggtgtataccctgcccgtgcttcttttatccggtatggggtcttctgtgacgagcttcatttatgacttgttcgtttccggatactctgttttgaatccgggtttattagccgtcatgcttctcatccgtctgatctcaggtgcgcttcttgccggccttctcggcaaagcaatcagtgatgcgctggcttacacaggagtgctgaacggcatggcgctcggaaaacaattcaagaagaaaaagaaacaggtgaaccaagatgcaggcatctgagccccttctatcggccggccgtcttaccttttcttatgatcaggatgaaaagccgattcttcaaaacgtgtcctttcagctccgcaaaggagagcgggctttattgctcgggccgagcggatgcggcaaaagctcgctcgctctctgtttaaacggtctgtacccggaagcatgcgatggggttcaatcgggaaccgtttctttatacggaacacctctttcacatctgacagaacccgccgccagatccatcggcgtcgtgtttcaagatccggaccagcagttttgcatgctgacggttgaagatgaaatcgccttcggcctggaaaatttgcaatatacaaaagaagatatggacgcaatcatcgatgacgttttggcaaaattagagatcactcatctgaaaacgcgaacgatcgcttcgctgtcaggcggttcaaaacaaaaagtggcgcttgcctgtatcattgcgatggaaccggaactcattattttggacgaaccgacggcacagcttgatccatattccgcacgtgaattagtgcggctgatcaaagatcttcaagcaaaaaaaggcttcggccttctcgttatcgaacatcagcttgatcattgggcgccgtggatggataggacgattgtccttgacgaaacgggtcagaaggtgatggacggagagacggacgttatctttgagacaaagattgaagagctgatgcagctcggcattccgattccgcgtgtgatctcattgcaggagcacgtcagcattccttttacattgtgtaaagaaaagctgtttcaagaatctgtaccgtctctgcccgaaccccggcccgccgcgctttcggcagaagacgcgctgagcgttcacgagctgtcattctcaagaggggcagacgtcatttttcaggatgtgagcttttccgtaaaaaaaggttcaatcaccgcgattgccggtcctaacggaacaggaaaatccacgctcctgtctgccgcggccaagctcatccgtccgctgggcggagacatcaaaatagacggcagaccgattgattcctattctgaaaaagagctgcggcggctgatcggatatgttttccaaaatcctgaacaccagtttgtcacagattccgtcattcaagagctgatattcggttttgaaagcagcagagccgcaaaggagaaagctcttcagctgttaacccgattcggcctgagacgccatgcctcacagcatccgttttctttaagccaaggacaaaaacgccggctcagcgtcgcaacgatgcttatgcacaatgtgaacgttttgatgcttgatgaaccgactttcggacaggatgccaaaacggcgcgggagtgtatgcaaatgctccgtgagattcaaaaggaaggaacggctgttttgatggtgacacacgatatggaactcgtctcagattatgccgacacgatccttgtgctctgcggcacgaaactggtattccggggaactcccgacgctttattttctgataacaccgggatcgccgagcaggcgcatttggctttgccgctgcggtatgaatggatgagacacgacaggaggcggagaaatgaacttgcggctggaggctgttaacccgtcaataaaggcggcggctgtattgttatgcgtcattatgctgtcgtttatttataatccgtacacccctgctttgttttatatcatcattgcgggaggcgtcctctcggcggggcgtgtgccgctgaaaaaatggctgctgttcacgattccatttgtcattctggccttcggttctttatggacagccgccgtattcggaaacatcccgacaaccggaagcaacctgctgtttaagctcgggccgattgccgtcaacagtgataacgcggcgcttgggatttctatcgcctttcgcattttatgtttttccgctttgtcgatgatgtttcttttcacaactgatccgattctgttcatgctcagtctgattcagcagtgtaagctgccgcccaagcttgcatacggcgttatcgcggggttccggtttctccctcttctgaaagatgaaatcctgatcatccggcaggcgcacagaatcaggggcgcggcgtctgattccgggctgaaaggaaagctctccgccttcaggcgcttcaccattccgctattggcaggcgcaatcagaaaggcggaacgcacggcgatcgcgatggaatctaaaggctttacggggagccgaaaccgcacgttttacagaactgttaccgtgcgccgcgccgactggtgctttttcctgctcgtgcttctgttattcggcgcaagctggctcatttcattgttgtttgtataaaaacaggccgccggagtgattcggcagcctgttttgttatgtatgttattgatgataattgagagcctgagcgagattggacttgatcgtaatatctgagaaattaatgccgagctgtacggcggtttgagcgatttccggcctgattccggataaagtggacgtgacgccgatcaatttcagcgcctcaactaatttaaaaatctgatgcgccaccatcgtatcgacaaccactacacccgacaggtcaattaacagatgttcaatcagccgttttgcacatgtgctcagcgtattttcaagaatgaatttggcgcgctccgtgtcaatatcgccgacaagcggcagcagcgccgtccgtttgctcagcgtgataaccggcgagcttaactccaaaatcatttctctttgcgcattcagctgcatttttgagttatgctcggcatgatcgacaaacgtgtaaatcgtaaaatcaaatacttgtacaattaaattctcccatttcttcctttctccctgtgcaaacgaagattcatgtttatcggcaaacgcatcataataactgatgtatagtctccggtttctcatgaattcacggaccacatactgtacgggagtatccagatgcttctggtctttcgcaagctcaatcacccactgctcgaactcttctaaaaattcttttttcggcatgatatacattttattaatatgccggtaaaattctttatcctgctccgtcagttcttctgtgatgacgggatttgtcaaagaataaatcgaattcggatccgaatcttccatcgtttcgatccactctttcgcaatttgatccacttgttctgaaaaatagttgtataatgcttcacttatcttcatatctcttctcctttcccatttccaattataccgtcagcggatcatgaatgaaaataaaagctgttaaactatccatttatttgaagttttttagtgcgatagattacgccttttttatgaaaatgcttcaaatgactctttccggccggcatgatctgccataaaatagtagcaacacccttgtatccactcgcaagcataaaaaaggagggcttttttatgaatggtgaaatgcatttgattccttatgtcacggatgaacagatcatggaggtgaacgagcttccagaggggattaaagtgattaaggcgccagagttgtgggcaaaagggtttaaaggcaaggatattaaaatcgcggtgcttgacacaggctgcgacatcaatcatcctgatttgaaagaccgaattgtcggcgggaaaaacttcaccgatgatgacggaggcaaagaagacgcgatttccgattataacggacacgggacacacgtttccggaacgattgccgccaatgattcaaacggcggaatttcgggtgtcgcgccggaagcaagccttttaatcgttaaagttctcggcggtcaaaatggcagcggcaaatacgaatggatcattaacggcatcaactacgccgttgaacaaaaggccgatatcatttccatgtcactcggcgggccaagcgatgtgcctgaattgaaagaagccgtcacaaatgcggtaaaaagcggtgttctggtcgtttgcgcggcaggaaacgaaggcgacggagacgagcgtacagaggaactgtcgtatccggccgcttacaacgaggtgatcgcagtcggatcagtctcaatcgcccgtaaatcgtctgaattttcaaacgctaataaagagattgacctggtggctccgggagaaaatattctctccacccttcccaaccataaatacgggaagctgacgggcacttcaatggccgccccgcatgtgagcggagcgcttgccttaataaaagggcttgaacaggacgcgtttcagcggacgctttctgaggctgaagtctacgcccagctcgtgcggcggacccttcctttggacatcgccaaaacattggccgggaacggatttctgtatttagacgcgcctgaagtactgatggaaagagccgaacaggcacagctgctgtctttctgatatttttctcatataatgattaatcagcttgtcacatcaccaatttttaaaatgtgagattttctattgacagtgatctgaataagctgataagataaccaacaaatgatgtaacttttcaaaaaaattgaaatattttctcttatcgagagttgggcgagggattggccttttgaccccaacagcaaccgaccgtaattccattgtgaaatggggcgcgtgatttttgcgccgagacgactgtctcataaggcacggtgctaattccatcagacgtgatctgagagataagagaggcttgcattttgaagttaaagcctctttctctcatgagaaagaggcttttttgttacatctcacttaaaggaggaaacttaatgacaacaatcaaaacttcgaacctcggttttccgagaatcggcttgaacagagaatggaaaaaaacgcttgaggcttattggaaaggtaacactgacaaagaaacgtttcttaaagaacttgacggtttattcttatcagctgtcaaaacacagcttgaccaacatatcgatatcgtgccggtctctgatttcacccattatgaccatgtgcttgatacagccgtcagctttaactggattccggaaagattccgcagcatcacggatcccgttgatacatactttgcgattgcccgcggtgtaaaagacgccgtttccagtgaaatgacgaaatggtttaataccaactaccattacatcgttcctgaatatgacgaaagcattgaattccgtctgacgagaaacaaacagcttgacgactaccgccggatcaaagaagaattcggagcggaaacgaaacctgtcatcgtcggtccgtatacatttgtcacgcttgcgaaaggatacgaagaatcagaagcgaaagcgattcaaaaacgccttgttcctctttatgttcagctgctgaaagaacttgaagctgaaggcgtaaaatgggttcagatcgatgagccggcccttgtgacagcttcttctgaagacgtccgtgccgcaaaagaactctatgaatctattacaaaagagctttcagggctgaatgtcctcctgcagacatacttcgattcggttgatgcatatgaagaactcgtttcttatcccgtacagggaatcgggcttgacttcgtgcatgataaaggcagaaaccttgatcagctgaaaaagcacggcttcccgaaagataaagtgctggcagccggtgtggtcgacggccgcaacatttggaaaatcgatgttgaagaacgccttgatgcagctctggatatcctcagccacgctgatgttgaggagttatggattcagccttcaagcagccttctgcacgtgccggtggcgaaacaccctgacgagcatcttgaaaaggatttgctgaacggcctgtcatacgctaaagaaaaactggcggaactcggcgtcttaaaagaagggcttctgtccggcaaagcggccgtcagtgagcagatcgaagaatcaaaagcggcacttaaggctttaaaagcattcgcaacaggagcgaactcagctcaaaaagaagagctgaatcagctgacggaaaaagatttctcccgtccggcaagctttgaagaacgattggcgctgcagaatgaatcactcggtcttcctcttctgccgacgacgacaatcggaagcttccctcaatctgccgaggtgcggagcgcacggcaaaaatggcggaaaaaagattggacggatgaacagtaccaagcctttattaatgcggaaacgaagcgctgggttgacattcaggaagaaatcggcttagacgtgctcgttcacggagaattcgagcggacggacatggtcgaatacttcggtgaaaaactggccggattcgcctttacgaaatatgcatgggtgcagtcttacggttcacgctgcgtacgtccgcctgtcattttcggagatgtcgaatttatcgaaccgatgacggtaaaagatacggtctacgcccaatcgctgacggaaaaacacatgaaaggcatgctgacgggacctgtcaccatcttaaactggtcattcccgcgtgtggatatttcaagaaaagaaatcgccttccagatcgggcttgccctcagaaaagaagtaaaagcgcttgaagatgccggtattcagattatccaagtggatgaacccgcgctccgcgaaggactgccgttaaaaacgcaggattgggatgaatatttaacttgggccgcagaagcattccggttaacgacgtcttctgtgcaaaatgagacgcagattcatacgcatatgtgttacagcaactttgaagatatcgtagatacgatcaatgatcttgacgcggatgtcattacaatcgaacacagcagaagccacggaggatttttagaatatttgaaagaacatccttacgtgaaaggcctcggactcggtgtatacgacattcacagcccgcgtgtgccggcaactgaagaaatctatcaaattattgatgacgcgcttgaagtgtgtccgactgaccgcttctgggtaaacccggactgcggactgaaaacaagacagcaggaagaaaccgttgcggcattaaaaaatatggtcgacgccgcgaaacaggcacgaaaaaaacaagctcagcttgtataaaaaaacagccatccgcaaatcgcgggtggctgttttttctgggcgtgctacttattcttcagcgccttcgcaagttcacttagtgaatcatgctgcttaatttgatagcaccgcccttctttttgcaaataccctttttggcagaattgcgtcagcacatgcaagagatgacggtaagatacacccaaataatcacagaccgttacgtgcttctctttataaaccccttcataagccgtctgcaaaataaaatcggccagccggttttcaagcgggaacgccagactttgtgaatatttcgaagccataagcgttgccttagcacttaaaaacttagccaattcacgcaggaatttcgcatcttgcagcaattgcgcgcggcagcggtaaataggcagagcaaaacaaacagtcttcactgaggcttgaattccttttgtgtaatacacttcatgtaatagttccatctctccgatgtaatcatctttgttgataaaattaattaaagaaactttcccgttttggtgggttacatatattttcgcttttccttcaatcacgtaaaacaggaagtcaggcctcctgccctcttgaataatccattcgtcccgctcatattcgcgcacttccataaactcttcagcggggaaagagaataaatgcgcgattgagtgtttttctaactgatgccgctttttctcgcctttataaacttccatcgtccaccccaaaaatatgagatatctcatattgtctttatgtctttacatgataacatgccaattaaaggaggaacgggaatgaaagcatatcgctggatgagtctgcatttttttagtttttttatgacatggggtgtttttctgccctattggacgggatggatggtgcatataaaaggggtttccgtatccgaagccagtttcattatgagcctgggcttggcggcaagagggatttccacattattattcttcccttatttatcaggaaaattcagcagcaaagccttattaaacggcgccagaatcgggacgcttctcgcacttttatgttatattcccgctgattcttttcaaagcctgcttcttgtcacattagtgctgcatgtgttttaccctgctttaatgcctgctttagacagcgcttgcggcgtccttgtacagcataacgaattaaaggcctatgggacaagccgacagtgggggtccgcgggttttgtttcagccggcgtcatcctgtccgtctttacaggtatattcggagatcaagcgattttatgggcactgcttttgggcaccctgatattcgcatgcctcagctttatgcatgcgccagctgttctttcaaaacggccggaaacagaccgcgcaagaaaagagggcatgtttgccttattccgcatcaaatatttcggtctggtgctcgcaatcgttatcttactgcaggcggcacatgcatcttactacaattacggttatctctttttgcaggaaatcgatgcccccgcatatgccatcggaatcattatcaacatcgccgttatcgcggagattatcttctttgcaatcgctgaccgatactttcatcaatttacagcaggctctttgctcgccttggcggcgcttggtgctaccgtacgctggatactcgtatttgcatttccgcatgtcatcattttctgtattgcgcagacgctgcatgcctgttcattcgcgatgggacactatgcatttatgaaatacttaattaaaaatatttcacccgcgcaaatcccgaaagcccaaggcatatattcagcgcttgctctcagctggagcactgcggtatttactattttcggaggttttttatatgaaattgaaccccggtatgcctttatcggaatgattgtttgtacgatcccatccatgctactcgcccttttatacagaaaacttgaaatgaaaaagagagtttttgcaggaaacgcacaagatatatagccatcgctttatagacgatcacatgtcccgctgtcattttgaccgatttgcgaatgctgtgcgatgtattttctctatatttaaagtatttccttcatatatgatgaaatcaaaaacagtggtataacccgctcaattggtttataaagggaatccattcagaaacttggacagaatcagtgaatatactgatacagtactgcttacgctcatttcggggaactttgttcgtaataaaatgattttcagccaactcataaggagggacattgtgtcacagcctaatttgcccaatatcacccctgtcgttacactttccagagacgataccattaaccttcttctttcgtcaattgctatggaagagctgggaatggcacatattctgaatgcggaaggggaaaaaatccaatacgcgctcggaacgattcccggattaacagggcccccgtcaagtcttgcggatattcttaacctgaatgagagcgtccgtgatacgcttgacagcttaatgaaacaggagcttcttctcggttcaaaattggacagtatctcaaatatccctacactggcgggaccgactggtgctacggggccgacgggacctacgggagcaatcggaccggccggagcgacggggccaaccggatcgatcggaccgacgggggtcaccggtgcgggccttcaagggattgttgcttttaatccgctgattgctcccacttacacaaccggacaggttgtcttgtataacggaagctcttacgtcgcaaacgtaaacagcccggcgggaacccctggagcctcagctgactatacacttttagctgcggcgggaatcaccggcgctactggcgctaccggaccgaccggaatcaccggcgctactggcgacacaggaccgactggaattaccggtgctactggcggtaccgggccgaccgggatcaccggcgctactggcgctactggaccgatcggaagcaccggcgttactggcgacaccggaccgactggaagcactggcgctactggcggtaccgggccgaccggaagcactggaacaagtctgacagcaacttccggctatgcgagcaatacgggcggcggtgttgtcgcagttattgtcggcggcacgaccatttccttaccgaatgaacaaaacctttcggcagatattacggctaatgccgcaaataccatatttaccgttgctccggcgggacggtactatatttcctaccatattaatttaacggccggcttgcttgtaagttcgcgtattttaatcaacggcactcctcctgcaagttcgattatcgccccggtcgcgtctttggcaaactttaataactcctttattgtgactttgccagcaggcagcaccatccagcttcagctgttcggattattgggtgcggccacattgcttggaggaagcaccggtgcagctttaaacattattcgattatcttaatggaacatgcaaaaaaaggatcaggcgtttgtccgctgatccttttttaattgagacagaagttctttcgcgggtttaaattgaggattgaacttcaccgattttttggcgtaagcgatggccgtcatatcatggtttaatgcagcatggcatttcgccatataataaaaggctctgaaatcggcggcaccttttaaaatgaagtgatcagcgttttctccttcaacctgcgttccgttttcaaatgctttgattgccgctctgtacttttccaaatgatataatacaaggcctttataataatgaagattgctgtaatcaggatatagcttgagcactttttcaatcccttgttcggcttcttcataccgtttgagctcaagcaatattgtatatttcaaataatacaggagagacggaggcattcgtttttcgcttaaaaattgaaaaattgagccgttgacaagatgtaatgctttttcatagtctttgattctgtagcattcacttgccaaatgatagacaagccacggatcaggattttcctctgaaagctcttcatttaaaatgctgatattccgtttatgtttttgcttgatcttttcttcctgctccaagtagccgtagtgatgaatcacacatgggagcgtgaaaaaagcattgttttcttcctcattggaagccgagatattctcgtgaattctgccttgatacagaaggcctttatgattgcggaacagtctcggctgcatgctttcaaacgcttcgttttcatcgagctgcttccccgtataattgatgattttcataagaccccggctcggtaatccgtcatgaagcagcgaagttaaaaaacggcccgtctcctgatcgagctcttcatccgcgtcaagcactaaaatccaatctccttcggcatgctgcagggcgtaatttctggcctttgcgaaatcattctcccattcgaaatcaaacactcttgcctgaaagcttttgcatatatcttttgtattatcttgtgatccggtgtctgcgatgacgatctcatcagcgatgtcttgtacacttgataaacaacgggagatgtatctctcctcgtttttcacaatcatgcaaagagtcagtttacattcagcatttccgctcattttctcacctttcccgattttggagttgttgattgaaccaaggccgttcaggagtgccgttcatcgtgatgatgacaggccgcacccatctgacggcaggttcggcagtttccgtattccattcctgaagctgcctgacagcccgcttcgtaatcggatgcgcccggaattcgcgcgggctttcagaaatgaattttttcgttcgttccgtaactgtcttcatttcaagaaagtgccgctcatacatctgcttctgctcttcttccaagctgatcattaaaaacagacggccgcctgtttccatctgccagcggcacaatgcggagaacagcctgatttcttctttgtaatttgaaccccttcttttatccacggtcacagataatatatgtaacagcgcaatcgtgagacaatgcatggcttcaaaagatgcctgtttcgcttttgagatgcttggatacggcatatgcttcacccgtctctttttttatgaacgctccccgccttttttcttccaaccgcagtcctcacaatccccgcactcacagcagccaatgcggccgtaaaacaggccgtcacacggatcttccggatcactgggatcgtctggattccacgggtcatcaggatcgcccggatcactcggattgctcgggtcgtccggattccacgggtcatcaggatcgcccggatcactcggattacttggatcatccggattccacgggtcatcaggatcgcccggattactcggattgcttgggtcgtcctggtccatacaggcttcagaatcctgtaagaagataatgtcctcaagcttcgtctgcaaaaggagttgtgatttcatgacggtgcgcaggagccgttcagtgcttctattgattgatgacaattcctccaaggagggatcgccggaagcgccgagaaacatttgaatcctttccgcttccgcctgcagaatatgggatagtccgatttcttccatagccacggatgaaagaaggaggttcagggtctcacatctggagagtgtaatgtcgggggtgatgttcggtatgtttggaagagacatcgatttctccctcttttctcttggtgttattatgcaaaagtgctatatcgtattcttattccgggagagaagagatcattactgatgttttcgttaataaaatatcccggatataaaatccgggatattcgttcggttatttattttaattcaagtttgacgtctacatttcctcttgttgcttttgaatacggacagaactcgtgagcggcatgcactagcttctccgccgtttctttgtcaagatcttttgtatcaatgacgagcgttacgccgattttgtaacctccgtcactctcatcttttaaaaggctgacctgtccttcaatttcagaggtcatgtcgattttttgtttttgggcggcgagctcaagcgctcccccgaagcaggcagcatatcctgccgcaaagagctgttcagggtttgtgccggtttctccgtctttttttgcattcggcatgatgatgtcaaaatccagcaccccgtcttcggatttaatatgtcctgctcgtccgccgactgcggtcgcttttgaagtaaataatgccattattatcagcctcctcattgtacttactgtatatattgcccctgctcatatttttaaacatgaggaataggaaatgggccgtttttcggctacaataggggtaacgttaacaaacaaagagttggtgaaagaagtaatggcagaaaaagattttgaacatatgaaactggagaatcagctttgttttttgctgtacgcaagctcaagggaaatgacgaaacggtacaaaccgctgcttgataagctcaacgtaacttatccccaatatttggcgctgcttttattatgggagcacgaagaactgaatgtgaaacggatgggtgagcttttgtacctggattccggaacgctgacaccgatgctgaaacggatggagcagcacggaatcatcatgagaaagcggtcggctgtagacgagcgatccgtgacgatcaggctcacagatgaaggacgggccttgcagaagacagcggcggatatccccattgccatgctggaacagacgggacggtcaaaagaggaattaaagcagttaaaacagtcgctttatgaggttttgaatacgctgcacggcaaaaaataaggatgccccgaatgggcatccttatttttattctgctgccagaagcttcacttcaatatttcccgctgtcgcttttgaatacgggcagacaccgtgcgctttttggataagggcttcaagctcctgtttatcaatgccggatgctttgacctcaagcgtaacgcctagtttatatccttggtctgcttcatctttcagcagactgacatgcgcagtgacctctgtttcaatactcagacgctcttttctcgctacgagctgaagagcgctgtcaaagcaggctgaatatcctgcggcaaacagctgttcagggtttgtggcatgttcgagcttttttgctcttggcgttcccggcatagcaacatcaagattcagcactccgtcagaagacgtgactttcccttcacgtccgccggcggctgatacggttgcagtaaataatggttttgtcatgtgaattcacctctattatattgtgtacaatttaattttacacaatataataagaaccgtcaatctttccgcataaaaaaagcctaccctttttgaaggataagcttaaaagattatacgcggatttgtccgtttcctttgatgatgatttttgtagatgttaacgccggaagccccatcggccctctcgcgtgaagcttttgcgtgctgatgccgatttcggctccgtatccgaattcaaagccgtccgtaaaccgggttgaagcattatgatacacggcggcggcgtcaacggcggtctggaagtaagccgcatgctcggcgttctccgtcagaatggcttctgaatggtttgtgccgtactgctgaatgtggcggaccgcctcctgtacgtcctgcaccgttttcacactgagaatcggcgccaggtactccgctccccaatcggcttcttctgcttgtttcgcttgaggctccagtttgcaaattacctggtctcctcggagctccacccctttttctgtcagctgattcagcagctttcgtccgtgttcttcggcccatttttcatgaatcaaaagagattcaatcgcgttgcagaccgaaggacgctgtgttttggcattgatgacgacctcgcttgccatttgaggatctgctgactcatctatgtacacgtggcaattgcccgctccggtttctaaaacgggtacggttgattccctgaccactagatcaattaaatttttaccgccgcgcgggatcaatacatccagcccgtcatttaatgtaaagagctgtttggcggtttctttgcttgtatcttctatgagctgaacggcatcaatcggaagctttgacagccccagtgcgcgtttcatcacactgacaagcgctatgttgctgtggatggcggaagaacttcctctgagcacaaccgcgtttccggttttcaggcagagtgtggccgcgtctacggtaacgttcggtctggcctcatagatcatgcccactactccaaggggcacgcggattttttcaatggataatccattctctttttgaatggtctccagcgattcaccgacgggatcttcaagaccgattaatagttccacggcgtccgcgatatcgagcaggcgtttttcatcaagagtcagcctgtcaataatgtcaggtgtcagtcctctgttccgtcccgcttcaatatctttctgattctctgttaaaatcagccggcgttcgtttctgagtccgtctgcaatacattgaagcgcttcgtttttttcagccgtcgttttcatgaccatttcggcagccgcttcttttgccaaggctgctttttgcaatacttcactcatttgtgttccccctcgtcaaataaattcacccaatcatctctgtgaatcacttccacctgcttcgttcctgaaagctggtcgctccgcttccctttggcttctaaaatttcatcggatgagtactgcgtctgccctttgccgataatgccgccgggccctttgacttccactacggcccctttcggaaaactgccgcagacatcagcgacgccggccgggaggagacttgacccgttatggatcatcgcctgctccgctcccccatcaatgatgatttcccctgatatcggagaatgaaacatgatccattgccgtgtattatttactgaggacaggtctttatcgccgatataagtgccgtcgccttttccgtctaaaattcccatcagtttttcccgtccggagccggttccgataaataccttcaccccgagcgacaatgcggtctgggcggcgagaagttttgacttcatgcctccggtgccgacctttgagcctgctgatccggcatatccgagcaattctggtgtgatgtcattcagatagtcgaaccgctttgcgtccgggttttcaatcggattggcatcgtacagcccgttaatgtctgtgagaatcattaattggtctgcatgaatcaaaccgcttacaagcgccgacagcatgtcgttatcaccgaacgtcagctcttcgactgatgtggaatcattctcattaataatcggcacgacgccacgctccaacagttccattacagtggcataggcatttctgtaccgctctctttttgagaaatcatttcttgttaataaaatttgtgccggcgtcagaccgtatctttttaaatggtccatatattgctgcattaaaagcgtctggccgactgcggcagatgcctgctttccttttatcgtaacgggtcgcgacggatagccgagagcggaaaaacccgctgccaccgcgcctgaggtaatgaggatcacttcatgcccgttttcttttaataaagaaatggcttccgtatgttccttgatttttgcttcatcaatgcttccgttactgttggtgagcgagctgctcccgattttcacaacaattctttgttttttcatcgtttctcctccgtggcaatcaatccaaaccggctctcttcaataaaaaaagcccattccgtcctgaaaaataaggacgaaatgggctttccgtggtaccaccttgtttgaacgcgtttttcacgcgtcccgctttcctgtaacgccaggttatcgcgcctgagttttcccctcaggactccaaggcaggttcggcaggtttcatgcggcaaaatgtttcagcgggccattttgctctctgtcacagaaagttctgcgtactgatcctcttcaacgctcaatgatttttttatattatgcaaagaaaacaggttcttgtcaagacattttcatccataaaaaacagtccgcctccccggcggaccgccattaattaaatacgatcgttttgtttccgtgaacgatgacgcggtcttccagatgccattttacggctcttgccaacacgctccgctcaatcgttctgccgatattcttcagatcctctgcgtgatctctgtgatcgacgcgttcaatatcctgttcaataataggcccttcatcaagatcgtccgtcacatagtgagaggtcgcgccgattaatttcactccgcgctcataagcccgtttatacgggttagcgccgataaaggccggcagaaatgaatggtggatgttaataatccgattcggatgggcagatacaaaatcagacgtcaaaatctgcatgtagcgggcaagaacgatcacatcaatcttataccgctccagcagctcaagctggcgccgctccacttcggcgcggatgtctttgttagctttcatgtaatggaacggaatattcagcggttcgaccacttctttggcctcttcgtggttgctgatgacgaccgcaatttcggccatcatattgccgctttgccattcccaaatcagttcatgaaggcagtgcagctccttcgatacaaagatcgccacccgcttcagctcacttgccagagacaggctccatgtcatgccgaatgtctgggcgattgaggcgaacgcctgctgtaagtcctcttttttctcacgaatgcccttgcagtcgaattcgatcctaagaaaaaaccgtccgccttcagggtcagtcgtgtattgatttgattcaataatgtttgcaccatgttcaaacaaaaacgccgacacggccgatacaattcccggctggtcggggcagctgacaagcaggcgccctttttcctcattcccgcggcggtattctttcagccgctgtgtcatatatgaattcatctgttttaatccctcgtatcttcataattcgtaacttactaataaattatactgaagatttgataaaaatcaatttacgaaagaattttcagccctacggcagcgcataaaataagcgcaatgaaaaagatgcgcttcgcatccttctgctcgccgtagaaaagaatgccggctaatgcgccgcccgccgtgccgataccggtccagatcgcataggccgtgcccatcgcgatcgtctccatcgcataagaaagcagggaaaaagaggccgcaaatccggcgataatgaaaagaatccattggactttcttttctttttgaaattgattcattaaaatgaccccgagcatttcacaaagacccgcggctatcaggctgatccaatgcattacgccttctcctccttcgtctcaggcttatcctgtgtgaccagctttaatccgatgacaccgatcagcaaaacgccgatcagcacgattttcaccggatcggcctgctctttgaaaagcaggatttcactgagcacggtgcccgctgtcccgagtccggtaaagaccgcatataccgttcctacgggcaggctgtctgtcgccttgattaatagataaaaactgatgatgattcccgtaatcgtgccgctccacgccagtgccgaatcagcatgtttcaggccggtgacccataccacttcaaatacggccgctatgaccactaaaccccatttcatgttcttcaccctttctgtatccggacaatacaaaaaagcccggatagtcgtctcacatgagattgactctcccgggcttttttccctccgtgtgcatatgcgggatatgtccgcatatgtgttttctctcggaccaggccatgtatgaacatgcggaaccctagaaaacatgtctgttcgtatcatactacatttcgccgaaacgttcaacgtcagatgtgatgtcaaaaaccgtcagctgcctctcccatttggtaacggtctcaccgggcaccataccgattttttccgcgacacggacggaggcagcgttttccggatcaatcagcgccgctatgcgtccgtattgctgcgtatgaaaaccgtagtccagacaggcgttcgccgcctctgtcgcatagccgcagccccagcggcggcgggcaaacatatagccgatttccatcaaagtgtttccgtttaccgtctgcggaacgattccgcattgaccgagaaatgcgcccgtctctttatcctctgcgatccaaagactgacgccgtatcctgcggccaatcgtttgttccaggcaatccattccttcgtttcccgtctgcttttaagagaaggataatatttcatgacctctctgtcggtaaacagcccgtacaaattttcttcatcgtcatcccgcatagtccgcagacggatacgcccggttgtcaggatggtgccggaagacttatgtttcatcatgcacgccacgtctcctttccctgtaatagattatggatccggcaggaaaagtcctttctcagcataaaaaaaccgctttttaaaaaagcggtttgatgattaccaaggtttatctgttccgagcgcctcggccagggccttgctgtgttttaagcggttttttcgttctccggcgcgctgaacggccgtattgtgaagcatgatttcttcctcggtttccggcacgatccgcggaacgggtaccgatttcccgtttgaatcaagcgcgacaaaggtcagaaacgacgttgccgcaagctcgcgttcgcccgtcatcagatgttctttaatgactttgacaaacacctccatagacgatgtgccgacccatgtgacgtaagattcaaggcatacggaatcctgttggccgatggggcgcaaaaaatctacagaatccattgaggccgtgactgtttcacaccggcagtggcgggccgcggaaattgaagcgatatcatcaatgtagctcatcagctttccgccaaacagcgtattgtgattattcgtatcaagcggaaaaaccctgcttgttttaacaacccttgtttctttgcaaaatcttgattctggcaacttcatattatttaaactcccctttggtgtctggtcgttttgactcattcatctgtaccctattaaacaatactttgaccgttttgtctaaaattttaaatattaagttggttagatattctctcataaatgtttcattattcatcacatccgggaataataaacgcaaaataccgataggaggatatcacatggacgtatccattcccaaatccacgcggaaatcggcttgccgcagtgagtttgatgctttgcagacagtcatcttatgccggccggaacacatggccatcaaggatattattaacggaacgcagaaacatttcaaacaagaaaatattaacatacccgttgccctcaaacagcatagtgagtttattgacattttaagatctcatcagattgaagtcgtcctgctgcctgccgatcccgcattgcctgagcaggtattcacccgggatatcggatttgtcttaggcgagacggcgtttatttcaaacatggcggcttcagtccggcagggagaagaaaaagtgtttcaaaacctgcttgacaataagaaaatcccctatacgcgactgaaaaaagcgaacattgaaggcggcgacatcttgatcgcagacggcaccgtttacgccgggctgagcaagcgcacggataaagcggctgtccgggagctgcaggaggcgctgccggagatgacggttgtgccgatccctctcaaggaggatttcttacatttggactgtgtatttaatatgatctcagaaacggaggcgctatactgcaaaaatggcttgcggcagaaagaaattgatcttctcgccgaacgttttgagatgatagaagtgcctgaagaagagcaattcacgctcggtcctaatatcttgtcaatcggcaatcagacaattatcagcctgccgcagcaccgtcatacgaaccgcgagctcagaaaaagaggttatacagtcattgaaaccgagttttccgaaattattaaatcaggcggttccttccgctgctgcaccttgccgcttgtcagaacatcttaaacatttacaaggcagtttccttcaagatacgttaatatagagaagacaagactctaaagggggaaaccgaatggctaagtacataggatacgcgggaacatatacaaaaggcggaagcgaaggcatttattgttttgaacttgatacagaagcgaaacggctcagccgtccgaagctggcagcaaagctcggcaacccgacatacgtcactccgaattctgataacagcatgctgtattccattgaaaaggcagacggaaaaggcggcgtcgcagcctatcagattcatcagaacagcgggaaattaacttttgtgaaccaccagctgattgaaggcccgtctccatgccacgtcagcattgatgataaacatgaatatgtgttaaccgctaattaccacagcggaaaagtgcacgcctttcccgtcaatgaagacggaagtctgcgggagccggctgccgaagccgctcatacgggaacaggtcctcatgaaagacaagagaaaccgcatacccatttcgcaggctatacacctgagcataactacattgcagccgtcgatttagggacggatacgctttatacttaccaaatgaaaaacggttcgctcacagaggtgaaaactcactctttcgcaccgggttcagggccgcgccacatcgttttccatccggcggaaaaatacgcctatgtcatgacggaaatcagtaatgaagtcatcgcgcttgaatacaacccgaccttaggtgaattcagagagctgcaggtcatttccgctttgcctgaaggctttacggacaaatcgcaaggcagcgcgatccgcatatctaaagacggcagatttctttatgccgccaaccgcggacatgacagcatcgccatctttaagatcaaccaatattccggcgaattgtctcttattgaatgggtgccgacagaaggaaactggccgcgtgatttcgcgtttgacccttccgagacattccttgtcgcgtcaaacgaagaaacgggaaatctggttttgtttgaacgtgatacggaaacgggcaaattgactctgcttcaatctgacattccggttccgtatccggtctgcgtgtcatttctgcatcaggtttaattaaaaaagaaagctgactttatattgtcagctttcttttttgtataaatggcaggcgacaaaacgccccgccttcacttcttcaagctcaggcgttatcttaccgcagagctccatcgcttcaggacaccgcgtcctgaatacacagccgctcggcgggttaagggggctcggcagctcccctttcagaataatccgttcacgcttgtcctcaagaagcgggtcaggaatcgggattgaggataaaagcgccttcgtatatgggtgaagcggttcccggtaaagcgcagcgctttctgtaatttccatcatgcggcccaaatacatcacgccgatccggtcgctgatatgcttgaccattgataaatcgtgggcgataaataaaaatgtcagccctttctctttctgaagcctttttaaaaggttgacgacctgagcctgtaccgacacatccagcgcggaaatcggctcatccgccacgataaattcgggatgcagagagagcgctctggcaatcccgattctctgcctctgtccgccgctgaattcgtggggataccggctgccgaaatccggatggagcccgacagcttcaagcagttcatccgccatcatcagacgggcttttcttgtattgtaaagattgtggatttccatcggctccataataatttcccttacggtcaggcgcggatttaacgaggcgtaagggtcctggaaaatcatctgcagcttgcggaagaagaccgaccgctgttctgccgcggcacggtgtatatccgtcccttcatatgataccgaaccggccgtcgggtcatacagacggagaataacccttccgagcgtcgatttaccgcatcccgattctccgacaagtccgaatgtttcccctctgttaatgtgaaagctgacaccgtcgactgcttttacggctttctttcttcctgcgtcaaaatgcattttcagcccgctgacttcaaggagcggagatgccgtcattttctattcccccttttcgcttatacagcggcgtacggtgcataattctttttcatagacggttccttccaaagacagcacttcgattgtttttcccgttttcggggagtgcagcattcggccgtctcccagcgccaaaccgacatggtggatcgcgccttttccttcttcataggcgaaaaacaaaaggtcagccggcaggatatcgtttaccgccgcgccgcatccggcttttgcttggtcagttgcatcacggggaagggtatagccgtttgctttaaatatcgaatacataaacccggaacagtcaaacccgaaaccgctcagtcctccccataaatacggaagcccgagaaacatcatgcccgtttcgatgacatcggccgcccgtccttccgtatgccggcactcgtctgcgtcagcttcatttacgaacctttctccgagcggcgtcaccacccggaaaaagcctttctcacgtcctgatgccggaagacgcgttaagaaacttacttccaagtccggttcgccatttgtgtgatataaaaaagctgtcggtttggtaatccatacggcgggggaagatgtatgaaagccgtcttttgaaagctggctttttttcatccaccccggatatccgcgcacatccttgtttgaaggctggccgggaacggcgacaaaagtccattccccttcctctttgagaatgatcacctcttccccgaaaagcgcttgcgtttggacaaggttgtctgtgcataattgcagccgctcttcatatcccatagacgctaaccattttctgatctgcggcgggttttcaagcatcggcgcatcatacgaacggggagatgacggcagcgtccatacgttggctgccgccgctgtaacggctgctctcatcttttcgccccctcttgtatcgacacaccggtaatgccgagacccggttcgtcgggaatcgcaatctgactgccgctgtatgtgatgccgccttgaatcaaatcatctttcagcataagcggcgcatcaaaatcaaacctcgtcacattccgtttgcccgcggcaaaatgggccgcggcggtgatgccgagtttggtctcaatcatgctgccgaccatgcactccacgccgcacgtttccgccatcgcattgattgtttccgcctgctttatgccgcccgctttcatcagcttaatattaattaaatcggcgcttctcgtctgcagcacgtgaaaggcctgacggggggtaaagacgctctcatccgccataatcggcgtgtctacggcatcggtgacctgcttcagcccggcgatatcgtctttgtgaacaggctgctcgacaagctcaatgcccagtccggcgtcttccatctttcggatcgcagtcacggcttctttcgaagtccagccttggttggcgtccaatctcagtttgacgtttccgccgacacgtgatctgatcgcctgaatccgggcaacatcgtctgatatgtcacctatgccgacttttatttttaaaatatgaaatcctttgttcacataacggtctgcatcccccgccatctcctcaggagagttaacgctgacggtaaaatctgtttccagtgtattccgatagccgccgagaagccggtaaagcggctgtccgtgcatttgcgcccatccgtcatatacagccatatccaccgcggcttttgcgctttgatttctttccaacagccggctgatatcaaacaaaacggcttccatgccggaaatgccccgccccaagagagcgggcttcagcacatcgtggacggcgctttcaataccgtccgcgctgtcgcctgtaatgacaaccgtcggcggcgcctccccccagccggtcagaccgttgtcaaaagtgagcttcacaatgaccgattcagcattgtaaaccgtgcgtaaagcggtcttaaacggctttttcagcggcacggacatccgtcccgtttgaatatctgtaatcctcacgcctgatcactcccttccggaaacccccgattcaatcgttaccgctttggccgccgtatccataaccgcgcgggctccgatcggaacggcgaagctcggtgaacaatggccgattttaaagcctttgagcgcgggcttccctgatttgacaatgtaatcgttcagcacttgctctaaagtaagcgacttttctttatgcttcggttcgcattggtgaaaatcacagaccaggattccggctgcgtctgacagttttccggccatctttaattgattcagcattctgtcgatttgatacggctcctcatcaatatcctcgataaacagcaatttgtcttttgtatcaatttcaaatggcgtgccgagtgtggacgtaatgagcgacaagttgcctcccgcaagctctccctcggcccttccgcctgtcagcacctctaagggagagatgtcctccgtataggtgaattccgtttctgtaaaaagctgatgatacgacgcttttgtcaggggatcagcatcttcaagcccgacatccgtgctcagcatcgggccgtgaaatgtgacgagccccgtattttgatgaatggcggtatgtaaaaacgtgatatcactgtatccccagaaaattttcggattgcggcggattaagccgaaatcgatgtcggcggcaatgcggcccgtgccgaatcctccgcacgcgcatatcaccgctttgacattctgatcactaaacatgtcatggagatcatcgaggcgcgcccggtcctctcccgccaaatagccgtgacgggtcttcagcgcccggccgagtttcacttgaaggccaagctcattctctaaaaacagcagcgcggtttgcagcgtcccgctctcaggcgggcttgcgggcgcaatcacaccgaccgtgtcgcctttttgcagtgctttcggtttatggttcatgactttttcaatctcctttccggattgaaaagtgaaacacgccgctcctttatcggcaaaagagcggcgtatgtttccgctgtaagatcaggacttttccgcccacttcagatcaatgtaaccgacggggtgccggacaatgcccttcacgccgctgttctgcagatgcacctgattgtaaaagtaaatcggaatgatcggagcctcgttcatgagcagtttttccgctttatgcatgagcgcaaaacgttttttggcatcggcttcctgttttgcctgcttgatgtagccgtcgtatgccgcgctgccccagccggtgcggttcatggaattatccgtctggaaagcctctagaaaactgatcggatctgcgtaatccggtaaaaatgagctttgagagaactggaacttcagtcctttctgctcttctaaaaagacgttccattccatattggcgagcttaacgtctataccgagcacacttttgagcttctgctgaatcgcttccgctattttcttatgctccggttttgtgctgtatgtcaatgtaacggcgggcagcttgtcataatgctcttctgccatgcctttttccagcagttttttggcttctgattcatccggatttaataaactgccgcccgcttcgcggaaatctttcccgtcaggctgagtaaatcccggggacacaaaggcatgtgccggcttttcactgtttttggtcacataatccgtgatttctttctgatcaatcgctgccgcgaacgcttttctgatcttttcattttgaaacggctccatttttacgttaaaacgatagaaatagagtccggcctgatcccacgtgcggacatttttccctcccatcagctgctcgctcagctctgccggcacaaaggcggtatccaaatcccccgactggaacatctgataatcggtattccggtcactgaccatcgcccatgtgactttatccagttttactgtctttttatcccaatacgtctcgtttttgaccatcgtcatgctgtcgtcatgcttccattccgtcagtttgaacggcccgttgccgacaaaggtttttgcttcagtgaaccatttcggatcagccttggcgaccttctcattaatcgggaaatacgccggattggacacgacgctcagaaaataatcctgcggtgccgccagtgtgacgacaagcgtttttttatcttttgccgtgactttcacgtcttcttgtttgccttttccgctgttaaattcttccccgcctttgatcatatagccgagaaaagcggaagatgcgcccgttttcggatcgagcatccgtttccaggcgtacacgaagtcttccgccgtaacgggatcgccatttgtccattcggcgttatcccggatattgaaggtatatgtcagcttatcagcggacaccttccagctttccgccatggccggttcgggcttattatcttttccgagcctcgtcaatccttccatgatgttattcagcggctgccaggaaacattattaaatccgatcggcggatcaagtgaggtcggctcattttcgttattgagccgcagcaccgtttcacccccctgttcttttgctttgccgggttctgtccccgcctgttcattggctgtacagcccatcagagcaaacgaaacaacagcaatcacaccgatcgcccatctctttttcatttcaatccccctttttcctctgctgccgtcagctgctgcttcagccgctctgcacggtgatcctgaagccagcagttgacgatatggcttttggatttcacggttgttgccgggtataccttttcacagacgatcatcctgtccgggcagcgggcggcaaacgggcagcccggcggcggatcgaataaatcaggcggcgtcccgtcaatcggcgacagctcactatcctccatatccagccgcggcactgaacgaagcagcccctttgtgtatggatgagccggacggtaaaaaatatcatgcctcgtgccgatttcggcgattttccccgcatacatgacggcgactctgtcggcggtctgagcgacgacgccgagatcgtgtgtgatcagaataatagacacgcctgtttttctttgaatcttcttaaataattcaaggatttgtgcttgaatcgttacatcaagagccgttgtcggttcatcggcgatcataatttccggctcgcagatcagagccatcgcaatcacgatccgctgccgcatgcccccgcttaattggtgggggtactgcttcaggcgggatttcgagtccgggataccgaccagatccagcatggcgagaacttcggattcagcttgttttcttgccatggcgcggtgttccaacagcgcttctgagagctgattccctatggtcaaagtcggattgagcgccgtcatcgggtcctgaaagatcatagaaatatcgcgcccccggattccccgcatttcccgatccgacatttggcaaaggtctttctgtttaaattgtatgcttccggattcaatctttgccgaatgtttcggaagaagacccatcacggcttgtgacgtcacgctttttccgcagcccgattcaccgacgatcgcaaacgtttcacctttatataaatcgaagctgacgcctctgacggcttttacagtgcctccgtatgttgaaaaagtaacatgcagattttgaacggaaagaacttgctgcgccatttttcctacctcctcagtttcgggtctaacgcgtcctgcaagccgtctccaagtacgttaaacgcgtacatcgtcaaggaaatgaaaaaagcggggaaaaacagccgccaccaatggcctgataaaatcgccggcagcccgtcgtttgccatgactccccagcttgcaaacggcgcctgaatgccgagtccgagaaaacttaaaaatgattccgcaaaaatcgccgccggcaccgtaagcgtcatttggacaataatggctcccatcgtattcggcagcagatttttcttaatgatccgaaatgttttcgctccaaacgttttcgaagccaatacgtgttcatcatgcttcatcctcagcacctgccctctgacaatccgcgccatgccgacccatcccgtcacggtcagagcgacgataatggaactgagccccggccccatcagcaccattaacaaaatgacaacgagcagatacggcaatccgtagagaacctcgatgattctcatcatagcgctgtctgtccggccccctttgtagccggcgacgcctccgtagatgacgccgatcaaaaagtcgatcagcgccgccatcacaccgacaaataaagagatcctcgctccgtaccacgttcttgtaaacacgtcccggccaagttcatcggttccgaaccagtgtgaaaaagacggcggaagattctgctcggcgagcgtctgccttgtcacgctgtgcggtgatatcagcggaccgaacgcagccgatagaaacaggcagcataatatcacaagcccggccatcgccaatttgttctttttaagccgccgccacgcatcctgactgtaagacaggctcggacgcttgaccgactcggtttcaccctttctttccgcgcccggctgaaaccagtcatcaggcacttctgtgtgttttaccgtttcttgcgggagattcatcaggatcaccctttcttatgaagttttatgcgcgggtctaacaggccgtatgccaaatcaaccagaaacagcaggacgatcagaatcacactgtaaaatacggtcgttcccatgatgaccgggtaatcacgctgattgatgctttctacgaaatatttgcccattcccggtatggcaaaaattttctcgatgacgaaactgcccgttaaaatacttgcggcaagcgtcccgagtactgtcacaacaggcataagagcatttttcaatgcgtgtttgatcacaattttgacgggagaaagcccctttgcttttgccgtgcggatgtaatcctgagtcagcacttcggccatgcttgatcttgtcagcctcgcgataatggccatgggaccgacggcaagcgcaacagtcggcaggaccatgtgaacgggactcgtccaggtagctgccggaaaccatttcagatgaaccgcaaattgctgaatcagcagcgtagccataataaaatttggaatggaaatcccgagcaccgcaaggctcatggccgcataatcgagaaagccgccgcgcctgagagcggccattatgccgagcgcgagtccggaaataacagcgatgatgatcgccgttatcccaagctcaaatgagaccggaaacccgcgttcaagcatagcgtttacactgtctgacggttttttaattgaaggaccgaaatcaaaggtaagaatggattttagatagatggcgtattgagtgataagaggttcgttcagatggtagtaggattcgagatttcgctggaccgcttcgtttgtgccccgctcttcgttaaaaggcgagccggggattactttcatcatgacaaatgtcagagtggtaatgacgaggacggtcataatcatggcgataaaacgtttaataaaataccgcagcaatgccgttcacccctttaacagaatgttgttctcatggcgagttctgtcatgacgagcatggcctgataggcttccggcatgtcttttgcctgaaattgaacgattgtcgttcccgggatgatttctgtgcccggcattaaatgggcccattcagcctgtccgtagttggcaaattcaatgcctaatacaggtctttcaggcggagtcagcggtttgaccttatctttatttttgagcgcataggctgttttttccgtcaggagccgtccggctttttgaggggacaggcatttgaccgcagttcttgaaatggtttgtttgacggcggcagtcgtcacattcgggatcagctcctccgcttcttttgcggcgcaatcatctccggcagccatgatgacagggacatcgtaaaatccggcgagataggcatttaaccccagttcaccgaccggcttatcatttatgtaaaagtggcggacgccgaatatcatgctgtgcgacatcacgcccggcatcgacgctctcgcatgatagccgataaacatcacgcccgaatacgattcatcaagcccctgcatcatggaaaacggcttgacatcccccgtaatcagctctgcctcagggtgaagtttttccgcgagcagattattcatctttgagtggctgtcattcacggtcacttccgtgcatccgttattaaacgcttctgcgatgcaccagtttgcttcttcggtcatcagaaccctgccgcgctcataattgtgcatgcgggaattgacaaatgtttcatcaggcagtccggaaatcccttccatatccacagatagatacagtttcatgtaatgcctccttttttacttaaaatttcgatattaaattatgaatattctaacaaattatattaaaaaaggatgaaacatgcaatataccattctgccattatgggaaaaaacaaacccttttcaccgggaaaagggtttgctgatagaaatagttacatactgtttttgcttatatgatgacgctgaaactgtctgaccgcacttctgtattcatgatcgggaatgacctgatgcctgatcggttcaggagcctgcggcgaagactgttcagccgcctgcttacggacggcatgcggtttatgcgccagcttatgtcccatgccggtcgcattcatgacaaatgataaacacactaaaagcaagcttaagatgaaagcaataagaaacaaatcgctgtatgtccccatcagcaggtcatgcggcgattgtgtgccgcgcgcgccccgaagcgtgccggaagcatctcttttcgtaaaataccctattaaaacaggtgcgcccatataaatgaaaagcctcaaaaactgaactgccgtcatgcgtttcaccagttccggaagcggtccgcccaacgcggctcccatcagtccggctgccacaataagccctgtcccggccgccagcatcacgaaaagccccgcaaatagaataagcggtatatgatgatctgccgtcatccattggaaattcacgaacaccagtataacagagcctgttatgccgagcatgcccggaccgactttatcatatgctaatgcactgatgacagcggcgatggccacgcctcccaaaaggctcgcataaaggaatatcagttgagtttgtgacatatgatatgcggtctgaagctccccgtgaaatgcagaaagactgaccgctatggaaatactgcccgcagcgatcatgaaaacacccagaatcggctttggaatcagcataagtttaatcgaaatcagcgcatgttcgtttctgtactgcatgatcagcaagatcagaagaatgacgatgcttcctccaaatcccgccaatgtctgccatgatgaaaagccccatttcggcagatgaataaatgtataggcggtcagcacggctgatacacccgctaacagaaaaccgatgccgtcaaatggagatttttcagcatttttataagcgtcatcccgcagccacatataactgaaaatgaggccgaaaaaagacagcaggccaaaaatgccgaacagccaatgccaatggccggcgcttgccgccgccgtgcctaaaacggttcccataatgacggacccgtaaaatccgccgattaacacaaataatgcgtaattccggcgctcaatcggaaacgaaagcaccagcatcgggatcataatcatcagcatagtgcccgccgcagctccctgtaaaaaacggcccgcggcgagcggataaatatcatttgtcacagcagcaaggagcgctccgatgacacccgcggccatcgaaatcatatagacaggccgggagccgaatctttttcttaaatacggccccgccggcacgaataaggcaaatgccatattaccgataataatcggatgaaaagagtcaaagttttccccgccgaccgtctgccggacaaggctttggacagccgaaagagcggtattcgacatcagccccggcccgaccgccaatacagcgagcagagaaataatccagtgatgtttttctttcatgtgacagctcctttctgactatttgacaaagtgaaaaagctaacagatctcccccattagcttgacagaattttcatatcttttcatgtgaaggattgaacataatatctcatttattatttcaaatccgatggaaattgtcaatataaagcgccgcgcgtccgatttcgtctttttcacaatttcccacaatcttttcattattatcccacactttttgtttaagatggagtcagtaataataggcaaatcatgctatgatgaaatagagaaacggagtgaacatgatggataactatcgtgatgaaaatcggacagaccaaaaagaacaggaagtccttttagtaaaagaaaacccgcagccggccggatattccgcgccggacgaggacaagaaaaaacgaagcttcggctggttcagaccgcttctcggcggagtgatcggcggagggctcgccctcggcatctatacatttacgccgcttggagaccatcagactcaagatacttccaatccggctcccgctcaggaaacgtcatcggtaaccgccaagcagacatcttctgaatcagacagcggcaaatcggcaaacagctcatcggcaaattcaagcagcatttcgaatatggtggaagacatttcaccggcgatcgtcgggatcaccaatctgcagaagcagcaaagcagttccgatttattcggattcggatcaagctcagattcaaactctaattcgtcgggtgatgcggaaacgggatcgggttcaggcgttatttttaagaaagcaaacggcaaagcgtatatcattacgaataaccacgtggtcgaaggcgcctcttcccttaaagtgtcattatttgacggcaccgatgtaacagctaaactcgtcggcagcgactctctgacagacttggccgttttagaaatcagtgataaacacgtgacaaaaacggcaagcttcggcagctcatccgctctcagaacgggtgaatccgtcatcgccatcggtgatccgctcggaaaagacctttcccgcaccgtcacacaaggcatcgtgagcggcttaaacagaaccgtctcgatctctacgtcagccggcgagtcgagcatcaacgtcatccaaaccgatgccgccatcaatcccggaaacagcggcggaccgctcttgaatacagacggcaaaatcatcggcatcaacagcatgaaaatcagcgaaagtgatgtagaaggcatcggctttgccatcccgagcaacgatgtaaaaccgatcgccgaagagcttctcacgaaaggacaggtggagcgcccttatatcggcgtgagcatgatcgacttggaacaagtgccgcaaaactatcaggaaggcacactcgggcttttcggcaaacagctgaataaaggcgtttatattcgagaagtggcgcagggctcacctgctgccaaagccggattaaaagcagaagacatcattatcagcttaaaagggaaagaaaccggcacgggcagcgaacttcgcaatattctctacaagaatacgaaagtcggcagcaccgttgacgtgaagattatcagaaacggcaaggaaatgacgaaaaaaatgaaactgactcaaaaagaagaaacatcttcttaacaaaaatccaaggcagccgccttggattttttatgtatagcggaaactttaggcctggatcagccgtatgacttagtgtacaaaggaggatacttacacatgaaacaaacaggacttttgctggtcgttacaggcctgatcttgctgcagctgagcattcagtttcctcagcaaaacgctgcttggggtatgacgcttggcgcaagcattttactgaacctttcgggaaccggactgatcatgcgctctctgcacacgcagaccggccgcagatgaatgaaaaaagccgcgggacattctgtcatcccgcggcttttatttcacataaaagcaccctgtccgctggccggacagggtgtttcggttaagacatatgctggtcccgataaatcttttcgtttttcatgccgtacgctttttgcacgatatagagcggacggtcttttgcttcgtcataaatccttccgatatattcgccgatcattccaagcattaatagaacgatgccgctgaataacagctgtatcacaatcagagaggaccagcccgtaatggtgctgttcgtaaacagcttcatgtataaaacgataaacatatagagaaaacccgctccggacatgatcattcccgcatagcttgccgccttgagcggtttatgagagaacgttgtgatcccgtccatggaaagcttcagcatttttttaagcgggtatttcgtttcccccgcaagccgctcatcacgttcatattctacagcagtctgcttaaagccgacccagctgacgagtcctctgacaaaaggatttttttcttttaatcttttcatctcatcacagacttttctgtccagcaggcggaaatctccggtgtcgagcggaatatcaatatcagtcacgctccgcagcagccggtaaaacatagaggccgtctgtttcttgaaaaaggtttctccctttcgtttcgttctgacggcgtacaccacatcgtagccttctttccactgctcaatcatatcaaggattaattcaggagggtcctgcaaatcggcgtcaatgacggcgattgcattcccctctgcataatccatacccgctgtgatcgcgatctgatgtccgaagtttctggaaaaatcaataattttcactctcggatcaatcagactgtgctctcttaaaatctcaatactgcggtctttgcttccatcattgacaaagatcaattcataatgctcttttgtttgatccatgacttctttcaggcgctgataggttgtctgaatgacgggttcctcgttataaaccgggacgactattgaatattgaatatgtctgctcatgttttttcctcctattcatcagattgaagttcgtatagtgaaactgactgattcattccgcccggcccgccgctcattcggctgtttttacccacggccttgctgctttttgtatcagccggatcactatttttcgttttctgatctgtgcttgattgccatttatctgaagatactttctttccgtttttctcaacccactgcacaatatcgttatttccgcctttgcccattccggatgttaagaagtattttactttcccttcttttacgagctttttaaattgagtcagcgtaatggccgggtcagacccgctgaaaccgccgatcgccatgaccgcttttttcgttttaataatgtaaggcgccgccgtgttggaatcggttgcagcaaatagatagtccgctccggcgttatgtttctctaaatagttgatcagttttgtattgacagatgcgttatccattcccatgccttttccgcttgttgaagcgagctgagggcctgtttcaggcaatgagctgttgcctccgtacagaagcggtgtgctcgcccaataaatcggcatgaccatcaagacgaaaagggctgcaagtgaaacataataacttagcggtttttggcgctgtttgaatacgaacagggcgattgctgccactgcgccgagaacgcctgctccgatgctccagcctgcgccgatttgatcattgtagtttctgaggataaacagctcaaatccggttgtcacaagaatagcggccggcaatagccaagttttccatcccgcctgcttgcggtacagatgaacgagggcgacccatcccgcaccgacaagtgccgcgatcggaggcgccagcataatgagataataatggtggaaaaattccgccacactgaagaatccggcaatcggcacaagccacgctgcccaaaagatcgtttccttctgttctgctgataatcgtcttctttctctcgccccggcggtcaataaaccggccattccaaaaatcgcaaacggcaggagccagctgatctgatcagataattccgtttggaaaaggcgcagcggaccaggagttcccgttccgaacattcctgaacctgattgcattttcgagccggtgcctgtaccgctttttcctccgccaccgggaccatctccgccgcttgtaggacctccttgaccgccgcttggcattttcccgttagatggaggtgccgtcatactgccgttttgtggtttgtctccgcttgctgaactgctgcttgaagactggccaggcggtttttgcatttgtgaagaaccatcggaagaagacatctctttcgatgcgtttccgtccggcccgccctgaccgccgccggaactttgccctgtcagccgctgaatcccgttatatccgaaagccaattccaatacggagtttgtctggctgcttccgacatatggccttttgccggctggaatattatcaacaatgagcggccatgacaatgaaacggctgctaaaacggctaacgcgcttaccaatgaaatgatttttttcttaatcgtggtgtttgccgcaatcatatagaacagcaagaaggccggcaaaatcatataagcctgaagcatttttgtgttaaagcctgctccgacgacaaaaaatgccgccaaaagccagatcagtctgccttttctgatcgctttaaagagaagccatgtggcgaacaagaggaaaaagaccagtaaagcatcgacattattcgtccgcgcgaccgctactgcgatcggtgtacacgccatgacaaatgaggcgatgcgcgccgccgtttttccgaacgtcggctttattaataagtacatgaatagaactgaacctacacccgccaatgcctgaggcaggatgacgctccacccgtgcataccgaatatcagcgcgctgatcgtttgtatctggtatgtaacaggcggtttatctaccgtgataaacccggctgcgtcaaatgaagcgtaaaagaaattatgaaagctttgaagcatactcgttaccgctgcggtgtaataaggattcaccgtatcgtcattccagatgttgtacatattcaagaatgcggaagcgagtaaaatgagaattaagactgcgtctatctcgcgttttttcattttcacctgtgttttcactccttttgtttaactttgaacaagtgtaacaaccaaatgtgaaaaatttattaataaacaaagacaattattttgccgtttacaaataggtaaaaagaatgacaaaacgggtaaaaaagcaaaaaaaagatgcccccgtcaagccgggaggcatctgtcatgatttctgatttactgtatcggtttcagccgtgcttctatttcagaacggcggtgttcgagataaggcgggagcgcaaccgttttgcctagctcttcaggtttttcatcaaccataaatcccggaccgtctgttgacaattcgaacagaattccgttcggctcccggaagtacagcgctttgaaataataacgctctacaatgcctgagttgctgaaaccttctttcgtaatgatgcggtgccataaagcaagctcctcttcattctgaacgcggaaggccacatggtggacgctgccttttccaggacgctcgcgcggaagatcgtttctttcaatgagatggacttctgtgcgcgcgcctccgtttccggattcgagcaccgtaaccgtgccccggtcttcatgcgtttctttcccgatttcagtgaagcccagcacatcggttaacacacgcagcgtcggttctgcatacgggacggtcaattcaacgggaccaagaccgcggaaagaatattcttccggtatgccgctttgcttcaccgcttcaccgatgtcttttcctttttcgtcagctgtcagcacaagccgctgtccttcatgatcccaaaaagcgagtgtgtccctgcccgctattgtcatgatgtcgccatgagcgacctgatgctcttcaaatcgttttttccaatattgaagcgcttgtgcatccgggacacgcaggccgattgaagaaatactgtttgttcccgcatgaaacggcgcgatccgcggaatctcgaaaaacgtcaattcagatcccggattggctgcttcatcaccgtaaaataagtgatacatcgtcggttcatcttggtttacggactttttcacaagcttcaatcccaggatgttccgatagaaatctaaatttttctgcgcatcagccgtcaatgctgatacatggtgtattccattaactttcattatgttatcctccagtcaattatctcgatttcgagatattttatatatatacaatttatgttatccggatcgcaaagtcaacccatctgcttcacagacggtctgcagactgtcgctctccaaataacgaaccttcgatattaaaaaaccattaatgttcgcttttaaaacagtattttttccttctcaaaagcagaaacctttatcttttagggaaaacaacaaaatcagaaaatttattttattcgtgtttcagcaattagggtttacaatatggaaaatagttttttcagcatgacgattttacatctggagggataggatatgcagattgaagagaacggacttaaaaaagagatcggccttaccatcgccctctcacttgttatcggcaccatcatcggttccggcgtatttatgaaaccaggcgccgtgcttgcctactccggtgatgcgaaaactgcgcttatcgcgtggctgttaggaggcattttgacgcttgccggcggcttgaccgttgcggaaatcggcactcagattccgaaaacgggcggactttatacatatctagaagaagtgtacggcgaattttggggctttttgtgcggatgggttcaaattatcatttacggccccgccattatcggagcaatcggcttgtatttcggctctttgatggcgcacttgttcaattgggattccggctggtctaaattgatcgggatttcagccgttttgtttttaagcatcattaacattatcggaacgaaatatggcggcatcgtccagggaattacgactgtcggcaaattgattccgattatctgcatgatcgtgttcggcctttggaaaggcgatcagcatattttcacagccgttacaagcagcatgtcggacatgaatttcggcgctgccatactggccaccttgtttgcttatgacggctggattctgcttgcggcactcggcggcgaaatgaaaaatccggaaaagctgctcccgagagcgatgacgggcggactgctggtcgtcaccgccatttatcttttcattaactttgcgctgctgcacattcttcctgcgaccgacatcgtcaaactcggtgaaaatgcgaccggcaccgctgccggaatgctatttggcgacatcggaggaaaattgatcagcgtcggaatcatcgtcagcatcttcggctgtttaaacggaaagattctcgcttttccgcgtgtctcatttgcgatggcggaacggaaacagctgccgtttgccggacagatttcgcgggtgcacccgacgttccgcaccccgtggattgccgtgtcatttcagatcgcgctggccattatttttatgatcgccagcaatcccgataagctgtctgaaatctctattttcatgatttatattttttacgtcatggcctttttcgccgtgtttatcctcagaaaaaaaagcggcggaaaaccgcgcgcctacagcgtgcctttgtatccgatcattcctgttttggccatcgcgggttcactgtttgtgctgatcagcacgatcattacagatacactgagctgcgtgctgtccctcttgatcggcctcgccgggctgccgctttatttttggctgaaaaacggcagaaaaaactgacaaaaacggttccttttacgggagccgttttttttctggcaaaatcacgtgcaaaagttgacagcaaattcacatcttttgttatactttttaagcaagatgtctgaattcgaagtatgttacgtttttttggcgaagtgggtaacataagaaaaacaggatgagacacgtttttacgaaaaaatcaagaggcgtttttttcgactttatctgttttttttcgacaaaaggctatataataatttgatgtgtgcattgtctcattcaaacaatggagggtttttaatgataaaaagaaaaaaagataagttctcactccttttaacagaaatcgcaaaaaacatagacgaaaccgcagaatattttgtcaactttaaagtgacgaaccagacgactttaaaggaatttgccgatacgttaaaagagtttgaaacaaaaggagataatcatgttcatgttatgattaaagagctgaacaaagcttttatcactcccattgaacgtgaagacatccttgagctgacaaacagcctcgatgacgtgcttgacggaatcgaacatttttcagcaatgatggagattttctcgatcacttcttccgatgagcatatcgataagttcagcggatacatcagagagtgcgcgaaggaaattttaatcacgattgaacttcttgcagaaaaccgattgaaggacattcaccctcacgccattaaaattaaggaatacgagcacagctgtgataacctgcaccgtaaatcattaaaaaatctgttcggcacagaaaccgatccgattaaagtgattcagtaccgcgaaatttacgaaacgcttgaggaaattgccgactcttgccaaagcgttgccaataaccttgaaaccattattatgaaaaacgcgtaacgaggggttataatggatactctattacttttaacgatattaattgtcatatgcgctttggtatttgacttcattaacggatttcacgataccgcaaacgcaatcgccacctcagtttcgacaaaagcgctgaagccgcggcacgcaatcgttatggccgccatcatgaactttctcggagcgatgacatttaccggtgtggcgaaaaccattacaaaggacattgtgaatccttatacattagacaacgggtcagttgtcattctggcggctttactcgccgcaatcgtctggaacttgatcacatggtatttcggcattccgagcagctcttcacatgcgattatcggagcgatcgccggagcggccattgcagcgtcaggttttgcaacgcttaattataaagggttcattaaaattatcgaagcacttattttatcaccgatcatcgcctttgttctcggctttatcgtatattcgatcgtgaagctgatttttaaagacagcaatctggcgaaaacaaataaacgcttccgcagagtgcagattttgacggctgccattcagtcctatacacacggaacgaacgacgcgcaaaaagcgatgggtatcattacgatggcgcttatgacggccaatttacataaaagtgatgccattcctttttgggtgcagctctcttgtgccctggcaatgggtctcggcacatccatcggcggctggaaaatcattaaaaccgtcggcggaaaaattatgaaaatccgtccggtaaacggcgtatctgccgacttaaccggcgcagccattattttcggggccacgtttattcatctccctgtcagcacgacgcacgtcatttcgtcttccattctcggtgtgggcgcttcccaccgcgtaaaaggcgtaaactggggaacggctaaacggatgctcattacatgggtcatcaccctgccgattgcaggtacactcggcgccatcgcctttttcatcttagatctctttttctaatgacggcatccgcttctttacagaagcggttttttttgtgacaggaaaatgatgtcatgacatagaatgaacatagcagaccatttttcaaattgtgagggatgctcatgcttttgttttttcagatcatggtgtggacgatggcggccgcgctcattttatatgtgtacgcatcctggcggtatgaggcaaaggtaaaagaaaaaatgtttgccatccgtaaaacgtggtatttactatttgtactgggctccatggtctattggacatatgatcctgaatcgctctttgccgcatggagacaatatttgattgttgccgtctgctttgcccttattgatgcgtttatctttttgagcgcgtatatcaaaaagctcgccggcaatgaattagagacggatacgcgggaaattttagaagaaaataacgaaatgcttcactcctatcttgaaaaactgaaaacctatcaatatctgttgaaaaatgaaccgatccatgtatattatggaagtacagaagcttatgcggaaggcatcagcagactgctggccgcttatgccgaaaaaatgaatgtcacggcttccttgtgcgactattccgcacaatcggataaggaccgcttgacggagcatatgcctgatgcggcggacgttcagtcccgtcttaaccgtaaagatgtctactatgatcaaaaaggcaggcttgtgcttattccgtttacagtccagaaccgccattacgtgatcaaactcacgtcggaaaacctgttgacggaattcgattatttgcttttcacatcgctaacgagcatttatgatttaatgctgccaatagaagaggaaggtgacggttaaatggagcaggcatttcaaaacgggcagccggaacaaagagcgaaaccgttcaaaatgtttaaaaaacgttcaatgacaagtatcgcaagttaccaggtcagccctcataccgccagaattttcaaagaaaacgagcggctgattgacaagtataaacaaaaaaaagcttgattacactaaggacaggagacacggctcttgtccttattccttttttccttatctttcatataataaaaccaacaaagagatgcgacaggtgatgatgtgaagaaaattgtcaggcgcgtaaagtttgtggattacggacgcttcgggctttccgcttattcgctgaggatgcgggcgaggaatctcaggctattgaaccggttaaaaaagaaaaaaggctgaatcccgcaatgtgaacgggactcagccttttttgttaaagctgcatcagaattttcgcttttacagcggggccgtagacgccgtcagacgtcagtccgtttacagattggaagcgggccacggcatctgcggttttcggaccgtagataccgtcaattccgttattgacagctcctttttcaggatagaaataaagcgcggcgagcgcgttttgcacctggtataccttttcgccggacgtgtacggctctgtcagctgaatcacctcgtccggaagagaatacagtgcttcaaccggcgggctgacgatcagtacttgtccgactttaatcaggttcgggtcagcgatgttattccatttctgcagatcggccacgctgacgccgaatttccgcgcgatcgctgacagcgtatctcctttttggacggtatacgtctgtctttccccagaaccgattccagctttaaactcatcccatgtatccaacagtcttctcggacaaagctttcctgaccaatgcttgtgcgcaacgacatttgcaagcgggatgccgtgcgaggtcattaatgtgcggatgagccattgggcgtttgccacggcctgtgaaaagttgccgtctgcgttttcacaaatttcaataccgatggatttacggttgccgtccccgtttccgtcaccggcatgccagccgctttcgttcagcggaagatgctgataaatttccgtatcatcgactgtgaaatgccagcttgtcggtgtatcgggatttttcacatagcttgcgtgacttttggcgttagctccgactgcagtattggctgtattgtgcaccgtaatgtaaatcggtgtcattgcatagcctgggcggttattgtttcctgccgggataaaatcctgtgtgatttttaccatattctcatctctcctatttcgataaattgtttatttttaataaagcctgctgttttttcccttttgctgtaacgtaattgtttttaaaccaggcggcggcagtcgttatgattgtaaaaacggccgacccggcggcatacagcgtatctgcaagctggctgacctggtcctcctgaatattcagcggcgatttgccgaacatcagcaaagtttgattcaataaagcaagcaaaagaagcaccgtcctgacgaccgtgcctttgtccgcgaatttcatatcggtttcccccttacttttgcagcagattgtacatgatggcgatggctccgccaatgacgcccgtgcagattgctgtcacgatcgctcctgtaatggtccgcttaatccatgttgtgttttcgtcaattttgttcagtttttcattcagcgtcatgatttgctgatcctgccggtcggatacccgctctaatgcggctacccgctgttcaagcaccttttgttcacctttgatgcctgcgaattctttttgcaccgcttgttcatccagaagcacttccgctcccccctcttacattgttctcacctcccttcggaagcttcattcttacgaaaatgccgtgcctttgacagaaaggctcccgccggaaatgctctggatttccatgacgatttccttaaagccggcaatatcaaatgaccacacttcttctgtgcctgacgtaccggcggctgatgtcccgtcatcagacctgattcctctgatcggcacgttttttcccgagatggatctcccccaaaacgcgacatggcccgactcagccgtgccggtgatttcgacgagaagttttttccaagcgcccgccgagaagatgcttccctcgcccgcctctgctgcattttcatgaaaaatcacgtctgtatatgaaaacgccatatcaccgcccgtaccgacagattggtataaaacaaattcggactgcttttgatttccgttttcaaaacggaaccggtaatatcgttttgtcaggcagacccaccccgaagcggtcagcactccgcctttgactgcgacaaaatgtgaagctgtccacgaattgttatcctcgctctcttcgataaaaagagttccgctgcggtccgaataagcccacccctgtactctgtctattaagacggctcctaaacggtcttgtccgaattggctgtaaacttcaatcgcttctagcggcgtattggtaagaagctctgccactccggacaaatcagcaacaggtgtgacataatcgtttttgttaccgcgataagcttttacggcgccgggtctgccaagttgatcggcgggaaattcaaatgaatgctttttcatcggccgtcctccttttctcatttattaaaaatgacaaataaaaaaagccgtttggcttatgacacagcatttttataattttcgtatgtttcacccgttatttcttgaaattcctcaggcgtgatatacttcgcggccacaccttcagccagatcttcggcagagcagtcatcatagcccatagcttgtttgaccatttctattgaggcccacttataaaacaaagcgtaaacccaaaagttaagtctcttcattttttcattctccttttacgtttaataattctaattttaaagacgctaattgcctgccgagtgactgctgcgcttgttcggctgcttttctggccaatttctcattcgccagctgtccgccgaggcctgcaagctggtttgaatcgggagccgtatctttttttaagctgtctttatatgcttcgccagcggtttccacccattcttgtttctcttcatcaaaaaatgggcgccacatgccttcgccgtttatttccggcggaaagtccgcagcgttaggcggcagcatataatttcctgtctcagaatccggataaagctcaaccggagtgcctgtataaatgttgttattgtcatacggaaatattaatttcatattctcgctcctttacgtgagtgccaaaacaaggtcaatataatagccgttcacattactttctatattggccataattcccgtcagcttcatatctccattagaataaataataaatttgctgtaaccggtggtgccgctggctgcaaccatcgtcacaacgcctttggccggcgcacaagaggatggcacactcccgaataccacttctctgtccgtaagaacgtgtccgttcaggtgaagggtgtttcccactttgcggtattgaagcggcctgtctcctgatttagcgccatttttataaggaacattgatccaaggtacattctcagtatcaagttcagtaatgaggcgacgccagccctgccagcccaagttcaaatccaaatagttcgtgaacatattatttttataatcgacggcaatgacatacccaaacgttccctttccctcactgtcaagagaggtaaaatgaaacatgccgcgggtcgaagcgctgctcggactgtctgccgctttgccggttgaataaaaggtgccgaacgccctgccgtttttaacgattttttcaagaaagttatcatcatcaccaattgtaagaagatagccgccgttatcgtttgttattttcgaaagctgtgccccgttccacatatttttatccgcctgtgtgacatggatgtcttttttattagcgtgagcgtctactagtttttgtacagcttctgtgttgtccaactcaacccaatcactccaaacattatttgccaaagacttacggaatgttctgttgtcatttgtcatggcaagaacatgaccatatgactttccgacactgcaggtccaaaacccgcgtccgcctgcaggaggggtattcgccgcagttttttcatatgagaaataggtcaatgaaggataatttaacaattcagcatgaagatcagttgtgacattaaataacggctggccgtcatcattcgaaattttatttaactgcgcattgttccatttatccttatcagattttgttacgtgaatatctgttttattagcatgtgcatcgacctttgactgcgatccttccactgactcaaactcacgccatgacgtccaagaatccgagcctgagattttattacgcataaactttcggcggcctgacgacgttgagtcgctgctgctataggacgtatattcctgataagcatacgttccgtagttgtgaacaaacaaatacccgttattattcactggcgcgtttaatgcggtcgtgacactgctcatataatataaacctgtatccgttaccgtattaaagtcagcaccgcttcgatactttgccaacccattatcttccgttaatttaaacagctgtcctgcattccatgtatccttctcagctttcgtcacatgccggtccagatcttgattgtgctgatcaaaatctttctttgctgcctgctggacattgtccacgtttccgaggccgatttgcgcctttgtcgttttgtgcgggttgttcatgtcgtttttatgggccgccagatccgtgtgtgcgtcatttatgcctttttcccagcggttgacgtcatcttcgttaatcggatcgtccggaagccagtctgttttttcttcgtaagccatcgttacaccacctcaaaggtaaatcttaaatcaagcgttctgttattgctgagatctaaatttgtttttcgttctgtgatgacgcttcctgtttcgtcaagcatctgcacggtttcaatgtgtttgacgtcttcttccctgcgtgtgagaacggtgactgcggcatcttttacggaaatgtccgcaatcggagtttcttttccgtttaacagcacttttgtgatcctgtttttcagatcggctgcggcacgctgtctgtaagcggctgatatcatggtaagaccacctcgttattgttgagtgtgacggaataaccgaccttcagttcactgacttttcggtatctccgattgttgagaatgacccggtctttgatttccagtgtttcgtttaatgcggctctcagtgtatacgccaaatgagcaggtttgattttttcaagcgtttcaatcagctcgttcatgtgctgcaggtcatcaagcccgatatcggcataaaaacgatactgccccggaaacatccgaacgtaagctgacggatgttttaaaaaacggtttagcgcctgctcgatcgcttgatgtgtgatgggcggaatattcgacatctttgaaatcagcctgagccgtctcatatcctccgtgtcacctgattcccgcggtatttttaatattttttcccagcgttcaagcccccacgtcgccgtcgtgataaagagctgatctgtcaaatcgaaaatatcgttattctgccgctcaaactcgggagcttccgcctcaagcagttgtgccatctcctttaatcgggttaaaaacggcgggaggtacgccatcatctcatcgagtctgctcaaggattgtcacctctttgagtttaggaatttccacgtcactgagcacgaggttttccgccgcaccgttcattttgatatcggcgtagtcactgacggatgccgagttataaacgatgttgttaatttgtgataaacggacggtgttttcttcaaaagccattttcttaaataaattcaggacgcctttttcaatctccgctttcacgtcatcgatcgagctgttcagctcaggcagcacggaagcggagatttcgatttccttccatacggcgctttccaccgttactgccgctccgatcggcgcctgtccttctccctgcccttcgtccggatcaatataatcctttacttttttgatcagaatatctgatgccggttccaaattcgcatttgtgatgacaaccttcaccgttccggctccgttccaaagcggaaagattttcgccctgccgacgccatcaacctcttcggcccattgtttatagtgctgtttatttgcgctgactgcttcccggcggacacgggtaaaatagcgcgcccttaagctgttgtcgtcttcttcctcacggccgggaattaatatatcgcgcacgactgctttctcaagcccgggtatcgtatcaagcggcagcaggttctgccctgaaatgccggcattgcccgcttcaccggctgtttcacattcaagcgttccatcccccgtatattgaaaatacaggttatcaacgaagaaacgggagcctggcggaatggtgatgcccgctgtgaattctccggctctgaccgcttttgtggcaggtgttcgttcaattcccgcttcagcagcccgcctgtccagaaattctccctgagccgtatcggaaaacacgagctccagcacggtatcaagccaaatataagactttgcgagctcagcggccgcaggcgcgagcgcattgtaaatgacgctgccttctctcgtatcaatatctgccgtaatgcgcgccagcattctgtccataatgtcgtcaaacgtctgagcttcaaacatcctcacccagcacctcctctatctcaagcatgccctcatcagtttcaacggtaaaaaagacgatgaaggcatcatcttttttctcaatctcaaaattggtaacggccaaaatacggtcatcatacagcaaggcttcttctatcagtcttggaatctccatttttttataagcatccgtcgtgttctgatctgaaagcacttcctgaagttcgtttccaatatcatggctgaaaaccgaatatgaataccgttctgtgtgaagagcgatatagacgaattgtctgattgcgtccagtccgtttatcagttcattggtaattcggttgttttcaaaatcaattcggtaggtttgtgaagtctcaacggcctcactcgcatcctccaaatcttcaaattcgatttccggtgtcagggccattgcacccgctccttttagatttgttcatgtaaaaaagccctcttcggcagatgaagcggctttaataggctgatattctcgtacatctccgtccggatgccggttaaattttgtccagtacaaagaaagactgtcctcctgttaaggcggcggtcatcacccgatctcccgcctggagctgatcatcttctccggatctcagccgcttcggcacaatgagtgcatcagacggaatcaaaagtttgtcgtgatctttcagtttcagctcgagcggcgaaacggaggtcacttcggccggcatcagctccaccggcgcttcggcgtcaaccgctccgacggctaaatgtttaatggcatcacttaatctcatcaggatgtcccctccggaagtgaatttttctccgtgacgtcaatcgtcatggtatgttttgttccttggaattcatggcggtccgtatctacataataggttttcttcagcccgatttccggaattgagatatagacaggcaatccgctttccaacccgggaataccgatcgcctgtatatttttcagctctttcttaacgccttttttctcagcctgcttcacttttgcgcgctgtttcagctgggcttcgttaatgtcgtcagaaaccgtttcggtatactgcaaaacgccgaatgttttcatgcccgcgctgtctgacgcggaagcctttatcgttttattgtctttttgcagccgcatgacgacacgggttgcggtgtcatcaattgaggtgctgtattgataccctgtgatattaactcctgtttccagcacccatatgtcagacggctccggccattcacgcaagccgagcctgcctttttctgaatagagctgataattgcgccccgtctggctttttgtctgctttaacgcttttagcatcatatcgtaaaggcttgtatcatttttaaaaacgagtgatttaatggtatggcctgtgttggcaatggatgtgacgggaatttgaaaatcgctggcgatccttttcaatatttgatcggcgcgcttgttggaaaacacgtaaacgtcctggtttttcacaagatattggagcatatcgtatgcggtgaaggcgacggtatgctcatcgggcgttcttgcaaaaacaacgccgcggaacagttcttttccgttccatttgaacaaaaccgtatccccctccgatacaccgtaatacgtctggctgccctgctttacgacaatcgtcgcttcgatggagcggggcgcctgatatctgtgtccttccagcgtgacgctttctgtgacaagctcgagccactccgtttcttttatgacaaatagttcaatcatcttttcacccgtttcattgcggtatcttcagcttctgccccgggaagatccaatgccccggctgccggatattccgtttgctgcgcttaatcatggcggttttattcgcgttccagattttccgccactccgtatggtttccgtaaaatttgccggcgatgtcccaaagcgtatccccttttttgacggtatatgttttgggtgaggctttggacgggcgcttcgctttcgtttttttcttttgtttgatttttcttggcgaagcagttttatattctttcagtacgatatcaaaattccagtcgccgatttcattgtcgccttcgctgtaattaaagctttcaatgctgcatgtgacattgatttttgtccctgtaatcaaaaactgaacgggttttttcgctttcatccatgcttcaatgattgaaatggctttttccggcgaagggatgctttgatattcggcaatcgggctgtaccgtttcggaaaaaaagaagagaacgaaatttctttcgctcccggttcttcgataaacgtcacctctccaagtccggtgactttcacggaatcattctgcacgctgtttgcgatatcaatcgcttcagggagaacgggaagccggagcttgtccttcccctgagacagccaaaattcgtaaacagatttagtcaaaagcaacggccccctttgctccggtataaatgtctttttgcagttcatcaatcagcgcctgtttgattttggcggcgaggctgtcggcgtcctgtccgttatggaaatgctgatcgccgctgaattcgattttaatttcttttgttcccgttttttgaacggtttgtccgccgcctttaacggctgcggaaaccgtgccggctgaaagcgccgccggttccgtctgggacggatcggacacttccatgccgagcgcttgagcggcttgttgcagcagataacggccgcggatgccccgctcttcagggatgatccactcccgtttgttcccttcgccgacacgggcgatctgctccttggtaatcagacccccattggcataaccgacgtaagggcctccatgagccatacttttaatcccggggacattgctgatcgagccgtatcggcttttaatatagccgatagcggcagcggcgttgtgaattggatttctgatatcattcatacccggcgctttgtgatcttcaaaggtgcttggaatcgtctgcataagcccctgtgacgggtgtccggctttggcgttgctgtcccatagattaatggaattagggttgccgcctgactcatgctgtgcgatcgtcattaatcccggaagccagctgatcggcgtattggttgctttcattgcggccaaaagccactctttgacgcttcctcccgctgcacccatgccggaaaaggctgctgcaagcgagcctgcctgtttttcggcgtattttttcacgtcaactgagctgagccctttgacgacgccgactgaagcaaagcgcccgaggctcatcatgacacgggaaggagagtgaatatcaagctcttctctgaatgcgtcctcgacttttttggccatatctttggccgcctgtttgacttcgcttccttttgcagtcatccctgatacgaagtgtccgatcaggcctgacccccagccgttcgcggaatctcttgattgcacaaacggtttattgatatgtgtgcttacgtattgcgacgttcccgtatctttcgcattctgtccggccgaatatcctttcaccgttgcggcgccccatgatgacgattgattaaccgccgattgataaggtgttttcacctttgtttttaaaaatgaatcggtgcccgtcggcgaagtattctgacctttggcatagcccgcaacgacttgctttccgtaaccggatgaagacgaaataagggcattgaacggcattccgatgtttttttccttccagccgtccatatccaccgcttttttgctgattccgctgtcaaagccttcagtaaactgtttgccgagtgatgaagccgtcccgccaagtccggatgtctctacagacgctgcggccgacacagatgcagaagaagaaacaccgcccgctcccgccggaacagcagaagactgagccgaagccgcgcccatatcatcgacaacacgcatgccgagcttagacgcagcttgtgaaagcagcatctttccgcgtccgcgattgttgtcaacgggaatgacaaattctttaccggcttcaccgatccaggaaatggtcggctttgtaatgtagccgcccgtggcgtttttgtccgtttttttctttttatctccgccgcctcctgtgacaaagttcattatgcctgaaatcattttgccgccggttttatcccaaatctttttcacccagtcgaatgctgcagaaaaagcatctgatatggctgttcccacttttacaagaggttcttttatatgtttctcaaaccagccgcttaaccctttccatataccctttaccgtatctaaagcagtctggaaagcatctgatattcctttaccgacatttttcaccatgtctttcaccggattccagacagtatccatgaaccagccggaaaccgtactgaaaacggatttaattttatcccaagctcctgtgattttactccaaatggacgtcgccactccgacgacagccgattttacgggcccccacaccgtgctcataaaccagccggatactgtgctgaagacaccttgaatcgtcgtccacgcattcacgatatttgaccagatgctggttgccactccgacgacagccgatgaaaccggcgtccatacattctccatgaaccaggatgacaccgtgctgaaaatcccttgaatcgtcgtccacgcattcacgatatttgaccagatgcttgtcgccactccgacgacagctgatgaaaccggcgtccatacattttccatgaaccaggatgaaacgcttccccaagtatcttgtattgttgtccaagcactttgcgccgctttggaaatatcattccaagcgtctttcaaagcccctgaatcaaaggcctctcccaagctggaaccgcctaaactgccggcgatgccgcctaccgcgccgccgattagcgtgcccactccaggaacaacgcttcctattgccgctccggccgcggctccggcaagaccgccgcctgctgagccgaccttctctcctgcattatctttattgatgccggctaaatcagtaagtgataacaattcacctatgccgggaattcctttagcggcaccttttaaccctttcataccgccttttagcgcctttgaatctcccaagcctttcaaaagcgcgccgatgcctttacctgccccttttgttttcggcgtgtttacggatgcctgtttgctttcctttacggaggaacttcttttcgaggatttattccgctcttcgactttactgcttttgcccctcgtcactccggtacagcagcagcagccccccaaagccccgccggtttttttggctgactttcctgaagattttgacgctgttaccgtgcgctgtgaaccctttgtcagatcaggacgcttcgggccgttggagccgccggcagtaaggccgcccttactcttttcttttttcgtgccgcctcctaataatccgccgatattgagtttgcctaatttttcagcgattcctgaaaatattttttctattaattccccggctttttcgatgattttgtccgggctgaatttctcaaatttcttggcaatcttgctgacaattttatcaacaaatgcctcggctttttcgatgatcgcatcaggactgaatttgccgaactttttatcaatgcctccgaacagtgaggatgtaaactgctccactttttccaaaatcttatccggattgagaaaatcgaatttctcagaaattcggtcaatcgtgtcatttacaaattgttcggcgcgatcgattagcttatcaggactgaatttgccgacaacgtcgtcgactttcttcataaacgaatcagtaaaatgatccagctctttcaatatggcctccggactgaatttgctgacaacgtcatctatctttttcataaatgaatcagtgaatttatccagttctttcaatatggcttccggactgaatttactcacgaccccgtctacttttttcataaacgaatcagcgaatttatccagttctgataatatcgcctcagggctgaacttgctcgcgatttcgtctactttccccatgaatgagctcgtgaacttgtccagttcggctaatatcgttgcagggctgaatttgctcgcgatctcgtccacttttcccatgaatgacgttgtgaacttatccagttcggttaaaatcgttgccgggctgaatttgcttgcgatctcgtccacttttcccataaatgacgttgtgaacttatccagctctgctaaaatcgtctccgggctgaatttgctcgcgatttcgtctacttttcccatgaatgagctcgtgaacttgtccagctctgccaaaatcgtctccgggctgaatttgcttgcgatttcgtctacttttcccatgaatgatgttgtgaacttatccagctctgccaaaatcgtctccgggctgaatttgcttgcgatttcgtctactttccccatgaatgatgtcgtgaacttgtccaattctgctaaaatcgtctccgggctgaatttgctcgcgatttcgtctacttttcccatgaatgagctcgtgaacttgtccaactctgctaaaatcgtctccgggctgaatttgctcgcgatctcgtccacttttcccatgaatgacgttgtgaacttatcgagttctgctaaaatcgtctccgggctgaatttgcttgcgatttcgtccgctttcttcataaagcttgcagcgaatttatccagttccgctatgattgtttccggataaaatttggatgcgatgtcattgacttttttcatgaaggtgtctgcaatggagtcaagcattgaaaaatcgtttttcggcgaagcaggagcagcagatgcagaagcttttccgacgtccggcatattcttttgcattgcagccagctgtgctgtcaccttttcgtttaacgataattgaataacattgttttttcccgtcagcgaatcaatgcccgctgaaattcggccgactgttttcatgacgtgatctatgacgcgtatagtgacagagtacccgttctttaacgcagattgcatatagcgtttgatacgttccatggcaggggtcacttcgtctgacgcataaagtgaaacggtaaatcctttaaaaccggcagccagatcccgcaatctctcaaatgccgctgtcgcgctgtcttttgctcctattttaatggttaaagacgcaggcagacccgctaattgggcttgcaccttttgaatgacggcactggctccgtcttcagctgaaatagagatcatttgtgcgcccagctttcttttcatagagcgctgaatgcggtcaattgttcttaaaactgatttactctctttgcgtatatcaatttcactttggcgttttgtcattttcctgtatttctcaagcgctctgaagccattttggattttccttattttctttgaaacccgatcttccaattcaaaacgggcggtcagctttgccatgatgtcgctccccctttcttcgcttgtttttcaagaatgtccagcttgtaaccgattaaaccgtacaacagcgccttaaaatgtctcggtgcttcatataactctttcagttctgatggagaataatgaagctcatgcatcgcgtaatagagatacacggcttccttattcccatcttttatcagttttttgcttcttgctccagatcttctaattcatcttcaaaaccattgatctcaatcgctttattcagccaatttgcatactcaccgccgactgaaagcacgcgttttgccacctcgaccggatctgccgttttgtaagcgtcgcggagctccttagaccggaaatcagggtaaatcgtagattcaaccgcgatccgcgcatagaagcgctggctgtctaagtcttttacgcggcctctgcccttcacatttttatatgtcgtgctttccttctccagttcatcaatgcgctcagtcgtaatggctttaaaaataaaaggcacgatgtttccttttttatcgacaaaacgctttgaaagcggaacccgaatctcctcagcctcgactgttttacctggcataaagaatgatagatcatatacttgttcgtttttttcgctcatgatgaaaactcccttactctttttttataaaaaacaggcctgtaaaaaggcctgtttcactcataccgatcttaattaaaacgtttcagaaagcttttccggcacatcgaaatcttcaaaggtaaacggcacttcttcttcgagtgcttctgagtctacgtccagtccggcgatttttgcagaatcaaagttgacgtcatacagagtgacgcgttctgttccgcggcccgatgatttgtcatcaagaacggcttgcagcgtaaaatacgggtcgctgccttttttgacgtaatccatcataaggacggcgaatttggatgtgaccttatagaatgttgccgtgcccgttccgttggcgcctgttgttttatgtcccgtcatgcggcggcccatgatgtttacttctgatttgtttttttccacgtttgcttcaaacgttttaatatgcgccatctcttctccgtcgagaaataaacggccttcttttcctgaaatcgtgttttgcgcttttaatgccatcttagtttacctccacgttaaagtagaatttttctgccgcatccacaggctgtacggcgagatcgattaaaaagccgtcgcggtcttcattcagcccgattgtaatgtctttgtctgaatcaaagttggcgatgccgcccgcatcctgaagcgtagtcaaatattgaatgatcatcgttttgacgaattgaaggccgtcatttgtcgcaggaagatcgctgcccgtgccttttttcgatttaattaaggctttcagttcacgtgtcaaatcgttattcaccgcatcaagcacacggacgattttgtttttcgcgaactttttgtttttctctgccgtaaatgtcaccaatgagttgatatctttttcaacgctgactgacttatcacgggcatcataagagaaaaggaattcacctttggaaagacgttcgatcacttcatcatgagtcaggcggtgcagcacatcgacggcgccttcgtattcaacgaatgttaaggattgattaaatgcggcgctggcacttgcgcctgccacccaggcggtcgcatcttcagctttaatctcggttccgtcttccagcaggacaccttcagttacattgataatgccttcataatccccgctgtaatgggcggtcaccccttgcactttctgtccctgcgcatcgcgaaggcgtttaatgaatgcggcaaatgtcgctttcagctgatcgttttccgcgacaggaagagcgatgacatcgaaattctccgtttcagcagcagctaaaaaatccgtatagtctgagttgaccggtgctttatcagttccgcccgcgagacggatgcctgcctgcgggtttaacgtttccccggattcttcctcagtgcctgtcagcgggatggaagccgacagttcgcccgttcccgtgaatgtgacatagccgtttgcttttaattcttcggcttttttcaccgtttgtttgtcaacttccgctccatccatgtaagtggtcacatcgaaagcggtctgatcaaggacgtttttactgatgcggatgatgatgtcatttccttttgaaccgccgtacaaagcggttgctttaacaccttgtgaaagatcggcgctcgctctgattccctctgtcagacggtacatcaaaacggtttttgctttctttttcgcctcacgaagcagaatcagtgacggatcttcaatgctgagccccacttttttattcaaatcttcaatgcttgaaatggaaacgaatgttttcgcttccccccagccggatgcgacgggaagggcgacaatcccgcgttcaccgatcgatacccgttcctgggcggttgttttaaagttaaaatagatcccggcacgttctttttcttttccttgcgtaaatgttccgccgttcattattgcatgacctccttggttaaaaatgcttcaatgtaagacttggcttgcgcttttgtcatttgtttttgcttcacgccgaataaagccccctggagaatctcaggttttacgccgaaaagctccttcgcgtgctttgttaaatccgccgtgtcataaagaaccgctcgttccgccgctgcggcatttttctttttatgttgtttcacttttctttcaccccgctgttaatgtccacatcccgcagtgcgggagatgtttgtttctgatagtagtagcggctcgtccagcggattgtgatcactgcctcgcctttgtctccgactcttgtttcgatacggctgatgcggacgaaatcaccggtatcctcccctgattccgtaagcagcggaatcagctgtcttgattctctcaccgcatcagcgatccggtcggctgcatagagcgcctgcaccgagtcggcatggaacagcttcacattcagactgtacgttttcttataagtggagactgtatcattttcgtcaaaaacaaatgggggcggaatgtatagtgacggtacctgaaattgttcaggcagttcattttcatatacgggcacgccgcactgctgatacaaaaaagcggcgattgaaccggtttcgcgattcatccgatatctccccccaacgtgttaagccactgattgaaacgcttgtccagcgattcggcgaagagtgtttcatacaaaagaagggctttgtcccaaaacccattcccgctgatccactgttttttgagcgccattcccgttgaagctgacggatcatagatgaaccgggagccttgaaaatacccgggcacccatctgacattttcatctgagacggtccaatgtccgtcatttatgaatgaggcatactctacattggtgccgatttcaagggtcagtcccccgttttcaatgatccatacatgatcctgcgctccttttcggaaagaagacagcaggttttctgtttcaattcctcccgaatgaacaagctcctcccttaccatgtcgagaaaatcctctcctgactgttccagccattcgcctgcctgacgggcaaattctccggatgatgccttttgcagcgaccgattccattgctcaaggttttttatgctcatagtctgtcatctctcacagcgataacctcccaatggtgctgtcttgctttcttcggcatttccagaatatacgcctgtccttcccaaatgattttgtcattgacacgcacagcggcctctttcggaaaatgaacgagaaaccgctgatataccttatgatcaggcgcaagctgaataagctgctgctgtttttcaacaaacagacacggcacgtcttcagcgtcgggcacttccggataagaaaagacaggctggagcttttcggcgggaatcccgaagcgtccggccttcggaactgacaccgtctcatgataaatatcgcatctgtcagtgagcagccgttcgtagctcataaaggtctcacctttgcgtttgcagaaaccggggaataacccggcgtgatatattcacagagcagatggtgcaccgccggttttctgattccgccttcacctgccaccgtatacgagtagtcgcctatcttttcagattgataggcggaagcggctgcttcattctggttgatcagcgcaaaatattgagaaagctttaataacgcaagcttaatctcttcgggaagcggtgagtaaatagggtcagtgaacgaatgccccgccattctggccgcttccgcctccgcctccagaatgtcctgtattagaagcggctccggcctgtttttgacttgatcataaactgaatatgaaacaacgtcagacggctgaattaacataactgccacctccgtcttattctttaacgtttacgattttggcgcttgcatcttcttcttcaaatttgctgtcaagtttagccgtcagtacgataataaatttgcggctgcgaatatctttatctacttcgattcggatattccgtgaaaaaccgagaatgatatttttcgggtgagtcaaaatgatgtcagacgcatcgtactgggagtcaccttctccgaccgagtacggctgcagattggacactcctttgaccggaacgccgaatgctgaagacaaaccgccctgcaccgcaagatcccccagattggtctgacggtcagccacacggtctttccattcaatctccatgccttgagatgtgtaaaatctgaattcctgaggcaggcgcaaatattttgccggaatggcttttaagccttttttaaatgtggctctggacagctcttccccgtttccgtcaatgacgtgagatacagtctgcttacggattccgtcaagctgtgccaagtacggatcagaagaagatgtatcgccgtttacgacaagctcctcaatatcgactgccgcccgctccgccaaaatctgcatgatcgtctgctgcaggccgtctttttcaatattattttcaagcgtgtcataggtgatattaatttccgcaatgacttctttcgtattcagctgcaccgtacttgttgccgggacggtcagctgatcgtcagttaaggcttttccttcctcagcggcacgcagaatccgctgaccgaaaccgattttttcaaatttctgcgagtcattttccatttgaatcacacgcgattcgctgaaaatggtcggcgtgttctgcaccatgcggataaatgctgaagcttgtgcggggttcattaaaccgccgctttttaaagcggaaagtgacatttccgcctttctgatgatatcttgatttctcactctacagttcctccttctgactgggcttaaagcagtccgctccaaatggattttttaacaggctcttggccgcccgtctcttcttccggctgctttgatgcgcctcttactttttcaagcgcttcaatgcgtttaataatcggcgcgagcatgtcctcgacaagcgttttcagcttttcttcatcagacggcgcagccgccccgtctttgtcttccgtgttttggtccaagctgtcaagccgctttaaaagcgggtgcagcgcgtgctcaatcgattctctaacgtcttcttttctcatcttgttcaagtcctctcccttgcggtttcttgatttgcggtcacggtcgagaaattgcttgaccgcgccgaataagccggcttgcttttctgccggctcttcgtaaacgtcagcggttcccgccatgctgtagcccgtaatgataccggctttaatctgatcccatacttcatcggaagctttggtgacaagcacccaagatcctttccggatcacagcattcccgatttcaaagtcatccggggcgacgtacgactccaccacctcgccggtcccgccttcaaaattatgatttgtatcgatgttgcgggcgtccgccaaaaaaccgtgagcggccttttcaatctcttcagccgtcatataatcgccatgggcatccgggacatccggctcgtaaacgatgccgtaaacaagcttctgctcatccgattcgctttttgtaaacacctgcacctttttttcaaatgacggaaggcctccggctgattttgtaaaaaagaattccgtttggttcgccgccttatcgacatagctcacaaaactgatgacggcatttctcaattctctcggcacgagatgttttcaccccctttcaggattgctcctttttccctttcagcaccggccggctgtagtactcttcaggccattcctcaagcgtcttgccgagcactcttccggccagatcacggaggtcattaggagagaccgcgccggcggaaataaatggcgtaagcaccttcgcaatttcaagcggatcgcgaaaatcaggcccctttaatgtgagctgtacatcgtggagccccagttcaggcaaaaataacgtgttgagcttattaatcagcgttttccgctccggctgaaacacctgctcctccgttattttccgtgccgtatcggcggtggctttgttgtattcctgcgcctcgcccgtataaagcggcgggagacggaaagcggaacggagtttatttctgcttttgtcgtcatattcaagaaacagcgcatcatcctgcagaatttcggcaagtgatttaatttccacagacacgggcgtaatgtcttcgcctccgtgaaggtctttttccttcgcaatgccttccgcctcaatcagcagaaatttgtgggcgttttccaccccttccaggtcattcatataatcctggagctctttgtacgatgcttctgacagcatgccgttttcaaccgtaatggcggccggcacgtgacggccctgcttgaaatacataaaattcagttcttccgctttccgggcgccgtacagattgacgatattgccgacccagcgcggaattccgtaagtgccgctgccgatttttaagtgaatggcttcatttgcccggtattcttcagacagggtctttacgtattcgccggttctcatgtccatcatgcggggatcgccgtattccttaaaaaacactttccgaccgttcagcatctgaacatatttacggaaccgtttttgccttttaatcgttttggatgcgccattttcttcataagaaaatgtaacttcaacgggatcagtcacaccgcagacgcgcatatgtttcacatccagatattcaatccccgccggttttcccgccccatcccgaagcacttcgagaaaaccgttgcccgttttttcgcggtcttctatcgcatatccgaggatcgtctcggccgattcatcaaaatgaagacatttgtaaaagctctccagcttcatccagtttttttcggcccgggccttttttgacggggagcaatctgggctatttacatcaaaggtatattccacatcaaacccaaaacccgtaatattgacccgatacgcgtcaatgcactgctgaagaatcgtcgagtattcggcgattgttttcagttcaatgagattatagggcggtgaaatgatgtcttcgccgtacagatcggcaaattgatcttcgttcatctgccttgcctgcggcgcggccatttttgatttaaagacggtggctctaacgttttgatagttcggcaacgcctacctcctcctttcccgattcggacgtctccgtttttgtgatgcatctttcaaatccgccgcgtcatagtcatccagcgcataccaaatggctgaaagtgtgtggggatcaattgaaaactcatcttccgacagaacgccgtttttgttttttgcgtacgttaagttctgcaattcgcggatcgtatgttgacagctgtctgagcaatagatgtgtttgaaccgtttcagtttttttgtatactgaagtcttgagcccggaaactttttggccgcaaccatgcaaaagccctgcctgcgaaaatattggatgcttttcggctcagccgaatccgctttgatcagctctttttgatccgccaattcctgaagctcctcagctgtctgatcatcggtcattttgtttttgtaatactcccagaaaatataaagctctttttgatccggatcgacggcaagccggatgaccgcattgtatgactcttcaaaaccgaaatccatgccggtccgaaacagggggcgcctgatggaagcaatccgctccgttacttcgttgtgctccatgacctgaaactgcggaaacacgcggatgccgttgacgccgaactgtcctttgcgggcgatccggtataaatcgggatcgtaatgccgtaaactgtccagctgcttaatatagcttttcggcaaaaacagattatcgcacgctgtggagtggtggtaatacgtatcccccttaacgacggtgcctttttcatacagcgtctgatcatccaatacgaagcgttttttttgctcatcacgaaaaaaatgccggtacgtccaattggaggtgccgacgggatttgtggtgcatatcatatgaagcgaaagctcgggatggcgcagacgcccgatcagctccttaaagccttcatacttcacttcagagcattcttcaatccaaatcagtgaaatatgatgaatggatttcaatttggccgggttgtccatccctttaaacataatccggcttccgtttgaaaatctcagctgcatcggtgaagacacggcttttacggcaagtcccagctcaagctccccgataatatcttcaaacaaggcaaacgtagaatctctgtgcgtatcgaaaacttcccgcacgacaagcgccgtccgcttttcacgaagcagcttcaggatgattttcagcgcggtatgatagctttttgacgaaccgtagcctccgacgagaaattggtacgtttcattccaattgaacaaataatcttcaaagcgcgggttgaccgctttttcaatcatgaccgttcctctttccgcgtaatgacaatgtcaatcggcttttggctgtcttctgttttttccatcttctgctgtgccagctttaatttttcattttcgattttttgtttaaattgatcagggaaaaggtcaaagtacaaggacagcttttcaagagccttcatcttgtcggcaagctttattgcaatgccctcttttccgagttttgcttctgtgacgatggttccgtccagaaggtgcgaatctttaacgtcaacgtagctgatttcctgcataatcggcttatcattttcgtcaaagagcggccctgattttccgaaggcctgaacctctttttttccgaaggttacataatcggtaatgtcggcgaaagcgattttcacatagacttgaagaacgtccatcgcttcgacaaacactttattgaccatttcctttttcatgcggctgatttctttggcgactttttcgttttttaacagcctgcttcccgtcacatgcgcgctttccggtgaatacccggcttttatcgcagattgggtggcgttaaagcttttcacataataaagacaaaacagccgctggcgttcgtttaactcatcaccttcgcccggggtgctttttccgccgctttccgcgttcttatggagcgcctcgtcccagcgcccttcttttttccatctgccgatcgttcttgcggatacgcctgatttgccggcaagggcgcgatttgtgatgcggcctttatgagactgatagattgtaaatgcctgttctctttttgcgtttttcatgctacggcatcaccgccacctccgacatgattgtctataataaaaagcggcttctaatcgggccgctttttgtgatcgtctgttcacttctaggtggcaaacgtatgacaacttatgaagcaggcgattgatttctttgttcctgctgtttttgtattttcagaagcgcccgtttgaccgtcgtctgtacggttgatttctttacattcagcaaggcggcaatccgttcatatgaaaagcattccgctttgtggagcagcagcatttctttttctctatccgttaaaacggctaatgcgtcccgcagtctgattctgtcttcttcagtcacattcccggaaggttcaaacatcagcgcctgcgaataggtttctatgattctcggatctttaatcagcattctctgataagcgtctctgcggtctatcgctcttcttatgccgggctgccggcctttttcaagccattcgatgacatattccacatctgtaatgatcgttctgatgatttttttatctttcagttcttctgaagtaagcaccgtttcatcggcttcctccagctgcttgtaccactttttcgtctctttcagcgtgcgtttatattcaaatagtaagtcttccatgcagatcctcctctttttcggaacaaaaaaaggacaccaaccaatgcgcagcatgtacgcgattgatcagtgtccgcaggctttccgtcttggacgtattctgtttttttcgattaattcaatttaaagccgatttcatattcgacccgggccagatccccttttcgcgtttcgacaagcgttttgccgtgctccggcgcttcggcgagccatgcttccttcttcagtccgtctataataatcacccgaaccttgccttcttccagctggctttgtaatgttgtatgttcaatgtcagtcagttttttaggattcatgttttacgtcctccgtttttttcaggatgtttacttcatgtatgagacttccgagctcatttatgaacgcttctttttcttcagaactttctcaccggagcaggcggagagccgtttcggccgcctcaaaaagttccggagcctttgccatcaatgccgcgttgatctgctgagagtatgaacttaagttgaaaacggccgcgatgagccttccgtttgaataagggaacttctctttatccgcttcgctgtaagcggaataaatgtaaatggttttttcttctccgctgtgtacggcccgccatggagcggggctgtgtttttcttgcaatggttatcctcactttccatcagcctcatgccatgcttcaatttgcttttctatccgtttcgccctgaacagcaggcaaaaaagccatttaatatatttatacacgtgcatcaagcctcgcttttgcgtcttgaaccattcgctcaagacgtttaatgaccggcgttaaatcagtgcctgttttgcagttcgggcaagggtgaaagacagcgccgaaacccgtttccgtcacaatgaccttcttcggcccgcacagcttacacattatctcgccccctctaatctgtggtttacgtcaaatgaattgccattaatgatgactaaataatcgctgcacatctcataaattcttgtgcctaaggcttcatcaacctgcaccagtccgtcacaggccagctcgctcgagataagaaccggtttatgatttaaatagcggtaattcacgacggcgtacatttgttcaatctgccaatcggtcgcccggggttttccgttcagcggtttgaacagatcgtcaataaaaagcacatccgcctgtttcatacggccaagctttgcatcaagcagatcaaaatcattttttaaatccgtaaatccctccacaaaaggaaaatacagcacgggtgtctgcttctgtctcatgacataattgctgagagcggtcaaaagatgggtttttcccgaccccggacgccctaaaagggcaatgctgtttttccggcagtttttaatcttgtcgaagttttcaacatattcaagggcgcactcatatgcgtcgacgactgcctgaggcttgccccgcgtgataaatcctttgaaatccagcttccgaaaggcgcctgtaatctcacttgcgctgaggatgcgctctgcttttcgttcggcggcgcagcggcacttaacccacacatccattcccagctggtttttgagataaccgccctgatctttacagagcggacagtcaaagcggctttcgtctgattcttccggtctgtccgccagtaatggacgttttccgtttttcaggtcggccagtatctgctcgatcgttcgttttgtcatgtatcgtattcctctctttttttgttgtgattgtccttcccgcaattcgtgcattcaagcggtcttccatatacttggcgcaatagctgaaagccttgatcgtttcagctgaagctgtgcgccgctgttcaaaagcggtaaagcattcgccgagccatttgattgcttcttgtgctgacgcaccgagggaaacaatacgggcgatggcctgataatcccggggcgacgggtatacgctccgcccctcctgtgcagaccttaatctgataaaatgggcggcaatgtcgttaatcgtttcttcagcagtatgattttttgttatatctatttctctccggacatttttgtcccggtgatccgccgatattgtccggtcagttgcttccgggcgggtcaatgtctttttcggcgtgaatcttttcgagtgctttacggagacgatgagtccgtaaggggcgcggacggttttgatatattcatgctgttccaaaacctcaagccaccgtctgacggttttttcgctgacggcaaatacatcggccatctctcttgcttttacgggcttatgaccaaggacgatcccccactttacaccgtcttttacgtgttcctttgtcgttgagctgatgaaccataaaaacagccaaatggcggaccctattttgtcataatgttctgaattcagtaatccggaatagatgaaaaacgggtagcttttacgattcataagggacgtctccgtttgtcttcagacctatatagcgttcatactgcaatcggttatcaaatcggaataccggaagtccgcaagcggtaaaagatatcgaaccgcctgcttttcctaaacatctctggtcagccggatcgctgctgaaacggatgattatcggctgcatctctcaccctcctgatcaattttttatcgtacattgatacattttgtatccttatgatgttgattatatacgatacatttcgtatcatcaagacctttttgatactttttttatcatctctttattttgatacattttgtatctataatcataagtaacttagggtgttgaaaaaagagaggtcattcggatgataggcggaagattaaagagtctcagaggaaagaaaacacaggaagaagtcgcaaatcatatcggtgtctcgcgcgccagatattctcattatgaaaacggccgatctgaacccgattacgacacgctgcaaaagcttgcggattatttcaaagtgtcgactgattatttgttaaccggaaaagaaccttcagatgaagacatgtttgccgatcccgacctgcagatcgcatatcgggacatgcaggacttttccccggagagcaaacagcaggccattgaattcattaattatttaaaagaaaaagagaaaaaccgcaggccgaaacataaataatccgctcttttcctttaaactgcttaacgttcagccgatataaaagctgaatgtttatttttaaaagaaaagggaattgattcaaagtccgatcagggcttttctttctcgcttaaaaaagaacatatgttcgaaagggtgtattcaattgggcgattttttaacacatcttgaggaatacgtcaaaaacttatattgccgcatgggaatgaccgcccctctccatattgatatgcagatgattgccaaggagcttgacatttggattcattttgaagatacgcacagtatgatgctgaagcgggacggcatgtacagcatcgtcctgaatcaaaaaaagtcacccgaagagcaatggcaggattttgcgcacgaactgtgccatgtgctgaagcataccggcaaccattttcatatgaacaagctgttcagagaactgcaggaatttcaggccaaccattttatgtaccacttctgtgtgccgacctttatgctgttaaacatggagcttccccagcgaaggagccacgccgtcattttaatcgcagccgctttccgggtgacggcatcatttgcggaaaaaaggctggagctgtttgaacggcgtaaagcaggtattcaatttcagaagcggctcgcttgtctgttatccgacaagcggccgaatgtgtattatgaaagcggacagacacacttgcatgccgctgaagaaaaaacgccgtattttattgaaaattagcgatactctgccggcttggaacgcagccggcagaatgtcatcattctcaccgtgctgcccgccacgcacttcttgcgccgcatagcagctccagtaaatataagaacgggccccctgttcatttatcataaaaaccggccttcacggcttctacataccgaaaaaacagatcggttggcgtatatttttctccccggcagccaaaattgctgaacagcgcgtgtctctgcgccgtgctcacttccaattgcagccccattttcctttttgtccgattgacaatgttgcggggatttacacctgccagccgatcattcttctctgtcagctcggcatcaaaccccgcttcacgcagcagatcacaaatcagtcttgctttttccagatccgcgcccccgacgagtgtatttgcctttttcagatcatgatacccatgaaaagccaatccgtaatgatgggcggtcactttttctaaagccaggggttcgtcaaagcgtgtgcttgtcaaatggagagaacggttatcgcaccgcttcgttccttcaaataaataaattgagctttggtcagaaaatgcccgcaccagctcactgacacccggctcaatcctgccgccgtggggagcgaggacgatacatttacttccctccttttcttcataaataattctgtattccgattcagcagcagatagggctgcgaaattatcatatctatctttcatgtgtaacatgctctccttttccagtcagcaccagtttactctactcacctgggaatggaaacctttttatagtatgatttgatagaatacgtatcagggggggatatatcatggggttcatcaatggattgctgggcaatgcgtcgacaatatcgacggctgaagcaaaagcagaactggctcgtattctgctggaaggtgagaatgtcaacgccgcatttaagcttgtccgagatatcattgtctttacggataagcgtcttattcttgttgataaacagggactcacagggaagaaaacggagattcaatccattccgtacaagagcatttccagattcagcgtagaaactgccggccgctttgaccttgattcagagctgaaaatttggatttcaggcgcggagcttcccgctgtctcaaagcagtttaaaaaagatgaaagcatttatgatattcaaaaggcccttgcagcagtttgtatgtaagaagaaacggaagcccggggggcttccgttttattgattacagtttttcttcaattttcgccttcgttttcgggccgtaaattccgtctgccgttaatccgctgacggattgaaaacgttttacggcatttgccgttttcggaccgtaaacgccgtccgccccatgattttttgctcctttatcgggataaaaataaagagcggataaagcgttttgcacttgttttacgtttgtccctttcgtcagcggtttcgtcactttgatcacaccggatggaagcggataggaagacacagcctgactttttgaagaagaacccgtctgagcgagcttgatcacttgtccgactgtaatgtgattcggatcggtgatatggttgatgctttgcagcgattttacgctgacaccgtgcgatgcggcgatttccgataaggtgtcgccttttttcacatggtaatcagacgcggaagaagcaatagaggcttttttcgccggcatactcccgcttaattttttttcaatcttcgccttcacttcatcccagcggccttcagacaaaatgcggtgcgggcagtactttccgttccagtcctgatgctttctgattctgtcaatcccccagccccgttctttcaaaagctgcgccgcgaacgcaatcgccagttcttctgcggctctgtaccgttcgccgcctgacttgctgtaacagatttctatagcaatcgactttcggtttccggtaccgttcgtgccgtctcccgaatgccaggcattccggtccaacggaattccctggatcacttctttgtcatcaaccgcaaaatgatagctcgttgattcgctgtttcccgtcatatagctgatttcattagcggcggatgcgtcgtttgccgtgttatgaatggtaatatactccggcgtcatcggattcggacattttaacgcatatttatcagccgatacgagccgttttttcacttcaatccccactcttcatctctccttatgcctttttcatcaataggtggcattcgtaggacagataacttgagcatatagaccctgcattcggataaaaatggaatggatacgcacgcaaaaaataagacccttccacagaagggtctttatgttatgtttggttgcgcgcggcaatatggaatgtgccgtccgcttggttttccaaatggctttcatggccgatcacctgtgtaaagctgaacccgacagcaacaagcagcaatcctgacaacagtttagatttcatatagacaatctcctctctggatttgtttttgggcgtgcaccattttttcataaaacgtgagcgctttttcaggctgtccgtgtttcatgtaaaatttggcagcgtcatgcgccaattcttccacatacggatacagcatgtgttcttccagaaaatcaaacgtgtgcctgacggatgcgttatccatttccttgccgtataacgcatgtaaaaattggaacagattcacaaacaattcatcattgtattcgcgggcgatactgagcccgaggcggtattgcttctctgcttcggctgtagtgttctgtttataaagaacctgtgttaatgagtaaatagaatgcggaagattatcgaacttttctgacctgcaaatggaaacggatgtctcaaaatattcggctgctttagagaggtctcccattttttcgtaacagtttccgagattatataaggctgaactgataagacggggattgccttcttgttttgcaagatctaaagcaagttctaagtggggcaatgctctttctggatactgcatgtcatcataattccctgcaataacgaattcacattggattctgcggacgttgtacgtctcatacgattggtacgtttcaagggcttgaacggcataactcatggagacgtaggtttgtttcaggttgtaaaatatctcggccattttaaaagcaaactcagctttctcgatgtcatcagaaacgagtgcaaggtttttttcagcccgtttgtaatacatcatggcgtttaggaacattttctgtttaaattcgtacattcctcgaaaaaaattaaagtagtaatcaagcagtcctgtcagtttatactggttgccttcaatgtcttccaataattctgaaaactcaggctgagaagggtcctcttttaagggcttgatgtaatccagcatgacacggtgtctgaattccattaatgaataatacagcagcagatcctgatcttcttccatatcctcgatctctctctctacttcacgtttgacgcgctccgcctcaaggacgtgaaactgccggatatgggtataccattcattaattttgagcccgacaaaagaggacggaatagtctgcttcatcctcaataaatccccccttttggaatgaccgagatatgtcatattttatcatatttgctagaaaaagaagaacgcaaaaagaccgcaattgtcgaatttcggatatccgcaacgatttatctccgtcacaagcttattgcttgtttcttccgtgccgttgatatagcatatccttgcagctttttattctgtattaaatgggggttttcacatgacagcacaaaatcaattggtcagccactttctgtcacatcgaaacgtgacgattgagctggcggaaaaaatcagccgcgaacattacgattacaagccggcagagacatcaatgtccgctcaggaacttgtaaaacacatggtttattcttttcttatgtttgcaaacgtcattaacgacggaaacgcatcagccatccagaacaaaccgaaagaagaagcagaaacagacctcgtcaaactggctgaaacgtgtactgaaaaaacgacagacatcctgtcacagctgacagaagagcagctgaaccgcgaaattgacctgaccgcctctttcggcagaaaagtgaccggcgcggctctccttcagcttgccatggagcatgaaattcatcataaaggcaatcttttcgtgtatgtcagagaaatgggccacacggaacttccgttttatcagcaaaaatcataatccggccatccgccggtctgcgacataacagcaggctggcggattttttgttctgtataaaattttccgaaaatttaattgattaccgcctcttaatcatatataatctgataaaaatagtaggattattcaggaggcacacagatgacagtaagcattgtgtttatgggtttctttgtcggaacgcttgtcggattgacgggtgtgggaggagcagcgcttttgactcctttactgatcgttttggggatcaacccctcaatcgccgtcggcactgaccttttatataactccatcaccaaactgttcggtgtcgtttctcattggaagcagcgcaccgttcaatttaaacttgtcggttacttggcgctcggaagcattcccagcgcaacagccgccatcggtgttcttcacgtgtttcccgcttttcaccagcatcaggagcagattatcaaacaggcgctcggctacgtactgacccttgtcgccatttccattatcgcccgcctttttttcgataaaagactgcggccgaaccgctggcagcaaaaaacgcttgaagaaaagcggacactcatgatactgatcggcgtcattttcggtttcatcgtcggcctgacatctattggatccggctcattatttgcgatcgccatgttatacctgttcagaatgaaaacggcagaagtggtgggaacggatatcgcacatgcctttctgctcgtaactgctgccggtttgttaaacgcaagctttggaagcgtcgattacctgcttgtattgaatctgttgatcggctctgtgccgggtgtgcttctcggcagcttcttttcgccgaaattctcaccgcgccccctgcagtttgtgatggcggcgattattttaatcagcggaataaaactaatataaaaaaggcggtctgttgtcagatcgccttttcccttataacgtcacaccggacttaaagattgcaagctcccgaaaatcgtttttttcgttattgacgaattctccgcttgcaactttaataatgtattgaataaaatctcttacaatgtgatcttctgttgtttggtcttccgccaatctgcccgcgttgtaatcaatccaatgaggctttgattgaaataaatcggtatttgttgatactttcacagtcgggacaaatgtgccgaacggcgtgcctcttccggttgtaaacaaaacgatgtgacagcccgccgcggcgagcgctgaagaagcgattaaatcattgccgggcgcactgagcagtgtcaatccctttgttttcagtgtttcaccgtatgtcagcacatcagaaaccggtgcaagaccggctttttgggtgcagccgagcgacttgtcttcgagcgttgaaatgccgccttccttattccctggtgacgggttttcataaatcggctgctcatgcttcataaaatattgcttgaaatcattgatcaatcggactgttttatgaaacacttcttcactcgccgcacgctgcatgagaatcgtctcagcgccgaacatctcaggcacctccgttaagaccgtgctccctccctgtgcaatcaagtaatctgaaaatctccctaataaagggtttgcggtgatgccggaaaaaccgtccgacccgccgcatttcaatccgatgctcaattctgacagcggaatctcctcacgtttatctccctttgccgcaaggtgtatctctttaagaagcgcagtacccgcttcaatttcatctgtgacagcttgtgattcgagaaatttcacccgatctccattcacttcagaaagcgtttccttaatcgccgcaagctcattattttcacagccgagccctaaaaccagtacaccgccagcatttggatgacggatggcgttcatcagcatttgtttcgtattctcatgatcatcgccaagctgggagcagccgtattggtgctttaaaaccagcacattgtcaaagggcgcaatgtctttcgcctcttttacgaagcgctgcaggattttctcagcgacgccgtttacgcagccgactgtaggcacgatccacagttcattccggacgccggatgtaccattttctcttctgtagcctttaaatgtccggttctcatttgtaaaaggattgtcctcgaagcgcggtgaatacgtgtattcttgcacatcggataaatttgtttgcagattatgggtatgaatatgctcgccggccgaaatccgccttgtcgcacgcccgattgaaaaaccgtatttaatgatgctgccgttttcttcaatggtttgcagcgcgattttatgcccccgctttacagggtccttcacttcaatcgtcagtccgtctgtatgcagccgctcccctttgttaaaatggcgcatggcgagaagcacgttatcgtttttatggatttttatgacctctttcatttcacttcccccttttttccgcagcattcatgtaacgcatgcttcataccccgcttatgaatgacagacagaaaaaaagccgttcgttcagtaagccccggaagatgattcagattctccccccacaatcgctcttctcctaatatggcagatgccgcttgaaacatatcatctttgcaacgggaccgcgccatttgaaaacggttaagaacctcctcgccgtctgccggtttgttcggtccgttccagtatgaatagatcatggcgctgaacgaaaataccagcttctcaggtagccggccctcctgttcgatataagccttcagcgtcggcaggtttcttgttttgaatttcgcggcggcgttaagggtaatgctttgcagataatggtggatataagggtttttaaaccgctgtaacacatctgccgcgtattggatgacaccctccatttgcagcacagggaggatttcttcattgatcagctcttcaatgaatctgcccgtcacctcgtgctcagccgcttcccggacggtttgcagtccgtatagtaaagccactggcgccaatgccgtgtgagcgccgtttaagattctcaccttttttgtcctgtaagacgtaaggtcagacgtgatcagtgcgttcagcccggcctcagcaaaaggaagctcattctgaagctgttccggcccttctatcacccacaaataataatgctcaccaaccacaagcagacggtcttcgtatccgagaaaatcggtaagttcttccgcggtatcaacaggaaatccgggaacaatccgatccacgagggtattgcagaagatgttcgcgtcatgaatccattgagtaaaaccaggttccagctcccacagcccggcatattgaagcacggccgccttcagtttccgtccgttttcttcgaccagttcacatggaagcataatgcaccctttctcggcgtcacccgcaaatgccttatagcggaaataaaggaacgccgctaatttcccggggaatgttttttgaggtctatcctcaagccggtcgcctttctcaaacgtaattcccgcttccgtcgtattggaaatgataaaacgaagctcctcttgtgctgccagccgtttaaaggaatcatagtcagaaaaaagatcaatgccgcggctgatggatttgacgatcgtgtgttcttcagccggttttccatcctttatcccctgcaaaaaaagcgtaaataaaccgtcctgttcgtttaaacgtttgattttctcagagcctctcggctgtactgcgaccacgcttccgttaaaatccgttaattgattcaattgatcgatctgccagtctgcgaaggcccgcaaaaagttgccttcgccgaactgaaggactttttcaggatattgaatgtattcgccgcacatttttttattcagctgccgcaagctgtccgcctccttctgctttttgcacacgttaacattttttctcgcgaaaacccggttattcagacgagccgttatgtgagttttttgattgaatctcttatcatcacctcggtgttttcatacattttttccgccgccgtattcgggtcggcgataagcgccaaaatcttctctgcgccgagtatgctgattttttcaaccgggcgttttactgttgaaagcctcggcgtcatatattgggaaatcccgatgtcatcaaacccgataacggatatgtcttccggaacgttcaggcctttggcgaaaatggcattcatcgccccaatcgccatatcatcatttgaacagaaaacagccgtgggcggtgattgaagcgctaatagttcttccatcgcctgactgccgctttccatatcatagcggccttttacactgtattcatgcttaatcggaatagaatgatcaattaaagccgtcaaatagccttctttccgctgtgctgttgacctgaatccttccttcccctcaataatcgcgatatctctgtgtccgtttgcaatcaggcagtcgaccgcttgtctggaaccttctttatcgtttgataaaatattggtgatgctccggtcgtcaatgtcccggtttagcacaacgagcgggatgtttttctcgcggatatgataaataaaggaattatcgctgtcgctttggctcattaagatgattccgtcatacctcatagtcgtaatggtttcaaagcttttcagatcatcaatcgcgcgcacgaacaaattgtattcctcactgattgtgcggtttacacctttgatggtgtcggaaaaaaagctgtgtgaggttccgtttgtgatgcttgtaaaaaacagtccgatcgtatgggacttttgcatagcaagactttttgcatttacattcggtgtgtaattcagctgtgaagcgagctctaatattttctgttttgtacgctctttaatgtaggggctgccgttaagtgcccgggatacggttgtgtgggatacgttggcgagttttgcgatatcttttatggttaccattcggttttcctttctttctgtatactgtcatttatttctattgtaccattaacgggcagtccataaaatcactaaagttaaggttttgcatgatgtaagtcctgaacgagctcggcatgctgccggtccgtcagcttatacatcaaaccgataatcagcatggcgcacgctaaagcgaaagccgggtacagcagcagaagcgctttaatcccgatcagcgtgccttttgtctgagatgcattcgggatatagccaataacgctcagcccgatgcctgaaagaaaacctgataaagattgggcgagttttctggagaagttgaaaagcgaatatgtcgtcgcctccttccgttcacccgtcttccattctccgtaatcaataatgtccgacacgagcgcccacgtaatgccgtttggtatgctgatcccgataaaagcaatgctcgctaacgccgtaaagataaatacgtttgacgggagacagaaattcagcgcatcagccgcggcgctgacggcgaaaccgatcatcaccgtttgcttttttccgaaacgtttgacgagtttcggcataaacaaaacacctaaaaatgaagaaccgatgatgataaaactcatgtaggacatcagctccgcattgttgagattgtactgggcgaagtaaacaagcattgcggatttaatgttgtatgccgatattgagaaaatcgtcatgaaaacgacggtcagaagcggtttgttgccgataaagcatttgaaaaccgacatgacggaaagcttttctttcggcgcttcacggacgataattctttctttgcagtttcggtagcagatcataaatcccgcgattccgattacggccatcattcccatgactgccgggtagccgatgtgaacgttatcaaaatgaacaagaatcgggatgacgatgacacttgtaatgagcagcgcgccgagggagccgatctggcggaatgcggaaagcgccgttctgtcctccgcatcctgtgtaatggccgcgccgagggagccgtacggaatattgacgaaagaataagcgaccccccacagcatgtaagaagcataggcgtacacaagcttccaggtgacgctcacgtccggtgacacaaaaatcaatacggtcatgaccgcaagaataatacttccgaataataagtacggcctgaatttcccccgggggccgatcttttttctgtagtcaatggccgagccgacaatcggatcagtcacagccgcaaacagcttgctgaccaaaaaaatactgccggcgaacgctgccggaatgcctgcgacatctgtgaaaaacttcagcaaatagatctgcccgagatcaaacataaatccgttcccaaaatctccaaaaccataggatactttttctttcagactcagcttatgctccttcacttttgcggcaggtgctgtcacgacaggcacattactcataggccacctctttcattccattttttaaaagcggaaatattcctcagcattccggtaacaaataccctcgacaatttttcctaaaagctccatatcgtaaggcgcttcgccttgttccgcccagccgccgatcagcatgcagacaagccgcctgaagtattcatggcggggataggacaggaaacttcttgaatccgtcagcatcccgataaaacggctgaacaggcccatgtttgataacgctttcatttgctggagcattccatctttcgtgtcattgaaccaccaggctgtgccgaattgaattttccccggtgtttttccatcctgaaagctgttgatcatgctggcgataatatagttgtcattcggattcaaagaatacaaaatcgttttaggcaattgccgctttttttcggcggaatctaacagccgggcaagcggttttgcgatacgttcatcattaattgagtcatatcccgtatcaggaccgaggctgctgaacttatttgtattggtatttcttaacgcgtttatatggaactgcatcgcccagtccagttcggcgtaaagaccgcaaagatattgcagcgtccgtgttctgaatttcttttcatcttcaaaagacacatgctctccgcttaatccggctgcaaaaatccgggccgcttcctcttcggtcgtctcggcataaaccatttgatctaacgcatgatccgacactcttcccccggcattgtgaaaaaagcggacgcgggattctaacgcatctaaatacgattggtaggtggtgacagccattccggaagcgctctccagcgaacggacccaatcggcaaaacccgggctgctgatgtccagtcctttgtcaggccgaaatccgggcagcacttgaaccggaaaatcactttctttcaacagttcgtggtatgtcagcgcatcggcaggatcgtctgttgtgcaaatgactttgacatttgatttcagaatgagatcctttgcgccaaacccgtctccctgcaggagctcattcgtttttttccaaattgccgcggccgttttttcattcaatacgtcataaatgccgaaccagcgctgcagctctaaatgcgtccagctgtacagcggattgcctatcgccatcggcaccgtttttgcccaggcgaaaaacttctcttcatctgaagcgtttccggtaatgcagcgctcttcaatgccgttgcccctcatgatccgccacttgtagtggtcaccgtaaagccatgcctccgtaatcgttgcgaaggttttattttcatagatttcctttgggcttaagtgacagtgataatcaatgatcggcatgttttcggcgtattcccggtacagctttacggccgttgtactatccagtaaaaaatcatcacccataaaagctttcacactttcatcctccctcttaaaaaatgttaacgttaacaaaatggttcttttttattttagcttcctctttctcacatatcaatcatttttattttatttttcagaaaatttcatccgttaacattttcatacaaaaaaagacactgccgagaaagtccggcaatgtcttctgtgtgatcttaaggattagtaagcgaggctgaataatcctttgatatgtgttaaataacgtacgttacttgcttctttcattaaagatgccggaagacctttcagcggagtagagttcgctccgatgatggcaaccgcgtctttacgtccgaggcttgcaagcgtaccagagtttacaggcttgaatgtttcaagcgtttttccttctaagtaagcgaacaggttgtaaccgacaagttcacccatctgccaagcgatttgcgctgtcggcgggtacggacggccgtccggcgcaaagtatacagcgctgtctccgacaacgaatacatcttcatgagaagtagattgtaagaaatcgttaaccgtcgcacggccgcggttcacttcaaggccggattcgccgactaacgggttgccttgtacgccgcctgtccatacaaatgtgttggcaacgacttttgaaccgtctttcagatcaataacgtttccttcaacatttgtaacaggaagacctgttaagaactcaacgccgcgtttttcaagactttttgtcgcgcgttcgataaggtcatcaggaagaacaggaagaattttcggacctgcttctactaatttcagtttgattgctttcggatctacgccgtattttttcgtaaggttcggcatgatgtcagcaagctcaccgacaagctcaacgcctgttaagccgccgccgccgataaggattgttgcatcagcttcgtttttcgttttagcgtattcacgcacacggtcttccacgtgtttgtatactttgttggcatcagccgcagatttcagcaccatgctgttttcttcgagtccaggaatgccgaaataagccgtaacagaaccaagtccgacaacaagcgcgtcataagtcagcttagaaccgtcagaaagggcaacttctttcttatcaactgagaaagaattgacttctgcgattttaatgtcgacgtcttttcctttcagaagtttttcaagcggcatagcaacagcctgttcagacacgttgcccgctgcaaggcggtgcagttccgtaatgatttggtgagtcgggtatttgttcacaacggttacgcgtgcttcatctttactgtaatgtttgcgaacggttaaagcagaaagaactccgccgtaaccagcgcctaaaatgacaatatgttttgacatcgtatatcctccgtcctttatatcaatttgaatctgagattatttttgtttttcgttcatgatttcaagatagctgttagcaaaacggaacagcttttgagcttgaggatctttcagcatgcgcagcaggccgaaaagtccgatcgtttcattgcttgcatccgcgcggtcttttgcttcgatcgcagtagccgccacttctttcgctgtttctttcaccggctcaagaatttctgtaagcgcacccactgtatcgctcttcaatacttcgtctgtcgctacagactgtgcaaaatcataagacttcgttaaaatatttactaactcagtcagttttggaagctgatccactaaaacagtcagtgattcttgaacttcaggttttagcagctgatcaataagatcgcgttggccttggctgacagatgcatttgtttgatcgattgtttctggcatatccgattctcctttactataagcagtatgctgatttttttggaaagggtagcctttcccccttcatgcagaaaagcatgaaaaagcaagattgtgaattcatgcacaatcatttacaaaaataaatgtttactacccagtttttcactttgccatatccagtattatttttatatcaacaaaaacaattgaataagtcaaaatttctttttcctctctgaaaatagcaaacataaaaaaccccaatttgatttactcttatataataacactttttgaacaaaatttgaacgtgaattgtttcgtttatgaaattatttatatggcgggggtgtaataacgtttcttttaggctatttttttacagaccatccgcttttcccctgtcatttttcccacaattttaatagcgggcccgtttttcccgtaaaggggtcgcattccgggagggggacacggctgatttcttctgaagttctatcatttttctccgtttttgtatcgtactgccggccgcccggataagccccgatcacggtaaaatcaaaactgcccgacagttttttatgtccggtgccggccggaatgaccgctgcgtcccccgtttgaagaacggcatccgctccttgttccccgccgaacctcaaaaccgcgtttccttttaccgcgacaagaacttcgtgcgtggtgctgtgaaaatggtgatacggaaatactccgcccgtccagctgttcgaccaatcgtgccggctgaggacggactctgctttctgcaccgtttcttcattaaataccgctttataaataacaagcggaagattcgggttattcggaatgcggccgtcatcttcaaaataaagcacttgaatatcctctttctgcattgttttcacctccgtatatgtctgtttcccattcatcatttgttaaaacgctattttctcatattccattgcgaagcctgccggtgaatagtatagtataaaaaaatatgtgtcaaaatgagggatttaatgaaagccatcgtgatcggaatattggcatctctgttttttgcagtcacatttattttaaacagggcgatggagctttccggcggaagctggatgtggagctcttccctgcgttttctttttatggttccgtttttatttttgatcgtttatgcgaaaggaaaatgggcgccgctctggcatgaaatccggaaaaaaccgtttttttggctgaagtggagttttaccgggttcgtgcttttttatgccccgattacgtttgcggcggcatatgggccgggctggctgatcgccggcacgtggcagattacaattgtcgcgggtgtgcttctgtcgccgtttttctacgaaacaaaacattcaccggcgggcccggtttccgccagacaaaagatcccgctgatttcgctggttacttccgtcatcatcctgatcggagccggtctgattcagcttcagcatgcgggttctctgtccggccgcacgatactattcagcgtggtgccggtcgtcatcgccgcttttgcctatccgctcggcaaccgcaaaatgctggaacaatacggcggaaaactcgatacgtttcagcgggtgctcgggatgacgctcgcaagccttccgttttggcttttgatcgccgctttcggctggcatagagacgggcttccgtcaatgggacagtcattccaatcctttatcgtcgcactcagctctggcgttatcgcaacagtattatttttccgcgccaccgatatggtgaggaatgagccgcagaagctcgctgctgttgaagcgacgcagtccggagaggttctttttgcactgatcggcgaaatcgtctttttatccgcggcgtttccgtcacttctttcatttgccggactgttcattattattgcgggaatggtcatgcatacattcgcttcccggcagacagaccagaaaacggctgagcaaacgtcagccaatctcaccggttcctgatttttttacgaaaggtgtcctcctgtatgaaagaagaaattccggcaatatcttttctgtcagccggcaaacgctttgaacaaaacaatacgtcctttgatgtcctaagccgtgtaaccggacatattcaaaaaggttctatcacggcgttgataggcccttccggcgcgggaaaaagcacattgctgtcactgtgcaatctgatgaatacacctgatgaaggggaagtgcttgtattcggaaaagaaataagacactgggacatcagagagctcagaaaaaccgcgggccttgcatttcaatcagctcccgtcctcgagggaacggtgcgggacaaccttctgctcgcagaaaaactccacggggcacagcactatacgcctgaagagctcgcagattttacagaccttccgcgcgtgcttctggatcggaatgcaaaagaattatccggaggccagcggcagaagctctcattagcgcgaaccctcgccggactgccgtccatcctgctgctggatgaaatcacctcggcgctggacccgtcatccgttctcatcattgagaaactgattacgaaactccatcggcaaaaacagctgacggtcctgtggatcacccataaccttgaacaagcggaacggttatccgatacggtatggtttatggctgagggtcggcttttagagaccgcggaaacgaaaacgttctttaaggaaccgaaacacgaaaaggcccgggcgcttttacaagggagcgggtgctgatatgaatgatctttctctgttattgacaagtatatttgtcattatcgctttattcctgtctaaatcttttaaagccggcgtcgaaaaggatatgatcgtcgcaaccgtcagggccgtcattcagcttctcatcatcggctatgtgctgtcattgatttttcgcggtgatcacccgatatttatcatattaatggtgcttctcatgctcacggccgcttcgcacaatgtctccaaacggaaaaaaatgcggatcggctcattttggcgcgtttttctgacactggcgatcgcggaaaccgtgacgcagggacttttactgacccttcacatcattccgttcacttcaagatatgtcattccgataagcggcatggtcatcggaaacgccatggtgctctcaagcctgtttttatgcaggctcagttcggaagcagacctgcggaaagaagaaatccagctgattctctctctcggaggaacgcctaagcaggccgtccggcagatattgacgtccagtatgaagctcagtatgatcccgacgcttgaaagccagaaaacattgggtctcgttcagcttcccggcatgatgacggggcagattttagcgggggctgatccgatacaggcggtgcgctttcagctgctgatcgtttttacaacgatggcctccgctcttcttacatgtatcatactcagcgccttgacatatccttcccttttcacggaacactggcaattaaaaaaattcagcagggaagcgtaggcttttttccctgctgaatgatggtttatgacaaggtcagagattcatagtaacgggataattcaataatcatcgctcccatccgctcaatgtccggagcaaggaccctctttaccccttcatcccggatcgcttcagccgtcactttgccgactgcggcggcaagcacttgtttttcgaatgcctgctgcaattcttttgtggatcctttttcttttgcataatcaaagagagagcgcacttgaatggctgttgtaaaacatacggcatcgacctctccgtttaacagctctcccagcagtttatcaaccgtctccctttcaggcggaatatgctgatacggcagaacagggaatacctccgctccgtttttctcaaggaactccgttaagaccggcgctttttcgccatgaagctgtatcatgacttttttatctttaaagtcaaatcgttccaaggagcggatcagccctcttgttgtaccgtcttcatctgaggcatgcggcgtgatgccgagcttttttaaggccgcatatgttttatagcctctgcagccgattttcgcttcatgaacggccgctaaaaattcttctttcagaccgattttttccgataccgacaataacgtttccgtaccgatgcctgtggtgaatattacccagtcggctttttgcccggcaaatgttcttacgtcgggttcaatttgatcctccgccaggtatacggttccttggagggaacggacgaccgccgttccgccctgcttttctattaatcttgtgatctcttctgttttccgcgaaccgccgatggcaatccgtttcccgttcaatccttttcccatcgctgttttcttcttcccttcagatgccgggcgccctatggcaggccgtcatttatttctattattgttacgcaatcagccgggaaaatcaagctatgctcccgttgaatcccccgtgcagttgctgtatcattaaccgggcagaacgatttgattcgcggagggattttcaatcatggaaacaaaaaaagagttcgagacaaaaggatacgatacttcggtcatttatgagttcaatgaatatcctgatgttcacagcggccgatgtgacaattgcgactacacgctgtttaaaagctcagtgaagggcggaaaatttttgagggaatgccggagatgcggcatgaagaaaaacatataacaaaacaggcagccgtcttccggtgcgctgcctgtttctcaatcaattttcgacggccgcatttttcaaaaattcttcaatggcgcaaacagcctgtttggggccgccggtttcttctattttctgctgcatgcttttcacgcggctgaggatgtttttatcgccgtatacgttttgaacgtctttttgcaaacgggccacagtgacttctttcggcggcagatgcacgccaagccccaattcatccacacgctttgcggtaacctcttgttcgtgcatttgcggaacgacaacgagcgggacacccgcattcatcgcctccattgtactgttcatcccgccgtgagatacgaacagctttgctttctccagcacatcaagctgaggaacgtgctggcggatgataaagtgatcggggacatccgaaaaactttccggatcaattgttgtgccgactgacataataacccgccagtccgagtcccgaaacgcgtcaatacacatctggtaaaattcaggccaggcgttaaacgccgttcccagtgagatgagcataagcggacggtcatcggctgcatcaatttccagacttcccgtatttgtgcgttctccaagagacggacccgcaaaacagaatcgttcatcaaaggtttcctgtttcggctgaaaggcccttggcataaagacaatattcagtttttcaggcatgaaaaattcttccattgtcatccgtttcaattgttcattttcaatctgctcctggtattcttctatcgcctgtttggccgcttccagtgtttcttcgtctcttcctaattgaaaatactcattcattgcatagctcgggcagaactttacgaccgggatgccgccgttatccgcaaacaattttccggcaagagctaaaaaatcaaacaggacgatgtcaggaaggtcgtctttgtacagctcttccagctgcggaagcacttcaaccgcttcttccagaaacatcacaaacgcgtcatttttatttacccgttcttttatcgtctccgggtccgcctttatgcttgtgcggtataaaacgggaatggcgcccgttttggcaacggaagcttcaaattcctcagtcgtagcgaatgtcactttatacccgcgattgacaagttcctcggctacaggcagcgtgggattgacatgaccgtgagcggccacattaataatggcgatgtgtgtttttctcatcttttttcttctcccttattttcgtttatctccgcttctaaagactccagcccgtacatgacactgtttcggatcggctcaatccggatcggctcaaggtgtgaaaaggcttttacaattcctttcagcgcgacttccgcttcaagtctggcaagcggagcgcctaagcagaagtgtacgccgaatccgaaggaaaggtgcggattcgattggcgatgaatatcaaatacgcccgccttctcaaatttgttttcatcacggttggcagatgcaacgtagcagagaacgatctccccgcttttcaagcggcgtccgcgaagtttagtgtcgtgccggaccgtccttctgacaaacggagcgggagcgcgaaaacgcagcgtttcttccaccgtttgcgcgatgagagaagggtcctgtctcagctcttcataaaggccgggcgtctctaatatgctgtaaaccgcatttgaaatgagattagtcgttgtttcatttcccgccactaaaagcaggttgcaaaacgggatcagatcttctgccgtgagcttctctccctcttcttcctcttttatcaaaatagagataatgtcttggccgggctgttttcgtttgctttctattatttccgcaaaaaacgccgccagctccgcctcacattggtcacgttcctgctgatttttctccgccgcttcaggactcgcatctttcggcatgctgacgagaatgtccgaccattttttaaactgatccatacgttcggacggaacgcctaataattctgaaatcaccatgaccggcaaagggtaagagagatctttaacgatatcaatccgccctttgttctttgcctgtttcaggagatgatcggtaatgtctttaattctcggctcccattccttcaagacgcggggagtgaaagcgcgattgacggcggatctgatttgggtatgcttcggcgggtccatattcagcatggactttgcaatcgagcttttcacatcagtcatgaggcttgagaacgtctctttatcactgatgacttttttgacatcatcgtataaaaacacactccaaaccttcgtttcttcatcaaagtgtatagggctttcccgtctcattttttcgtaccaaggaaaagggttgtatacgtccaggccgttttttcctttcatcagggttctttggatggcttgtctcgtgctcctcagcttactcatgtttcatcactcctgattgtttcatatttgaatagttgacgtaccttgaattttatcctagcacatattttcaatttttttctattcataacctgaactattaacataacacaacaaaagtcatgaatccggaggtgaaatttctcccaagaaaacagcagaagcgcacaaaaaacccgagccttcggccaggctcgggagatatgttcactcattcgtctgcggtttctggtgctgcttttggtcttcaggaggctgcgtatttctttccatatcgtccgtatcagcgcccatgcctttcaggaaagaaaacagcagagtgacggccttgttgatttccgggtcttttaaagcgcggacgatatcaaaatacccggtcttcctgccgctgtctttttcctcgacggcctttgtgacccccgcattgattttaacgataaacggctcaagctgttttacatcgagcatgccgagaacgccgcttaacaacaggagatttttcagcatattggccgtttccggagtattcgccttcttcacgaggatatccatcactttgtctccctggccgaagagcccgcgcagaagcgccaaaacgccgcgctcgttcatgtgctgaagaatatgcagagattccaaaatcgcgtctttatttcgtaaaagagccgtctcgatctcttctaagtccttttttcgtttgtcttcttctgtgacggtctgttttcggatgccgctgattgctttagccattttgctgtttccccctttttacggcgtctcccgggaatacataatctttacgcgcccatttccgatcaacccggacaccgatctgcggctgcgggtttccgtaacggaaattgattttcggaagcggattaacgccttcttttttcaaaatctccatcttcgctgatgtttctttataagccggtgtatcggtatccttatcggcatagctgcttgtcaaaaggttaatggcggcgtcttttgaatcgttcatcggaagatagacttgtttgccttttaccctgtctgtgatgacgcatttgactttcacatttccgtacggtgatgtcagacggacaagcgttccgtcttccagccctctttcttcggcgagttcgggcgagacctcaaggaacacactcggtgttttttcggatattccttttgatcggtaagtcagattcccttcgtgaaaatgctcgagcagccgcccattattcacatggatatcatattcttcaccaaattctttcggctcggtccactgaacgggatatagaatcgctttgccgtctgaaaacgggaacttatccgtaaataaaagcggtgaatcggttccgtccgctgcaaccggccattgcagtgaattgtagccttcgagacgttcgtaagtgacgcctgcgtagagcggcgaaagcatcgccgcttcttccataatgtctgccggatgttcatagtgccaatcagcgcccagacggttggcgatgtccgtaatgatctgccaatcaggctttgaatcgcccagcggttcaaacactttgtaaaggcgctgcaccctccgttccgtattcgtaaacgtcccttctttttcaaggctcgggcttgccggaagcacgacatcggcgaactcggccgtacgcgaaagaaagatatcctgcacaacgaagaaatcaagcttttcaaatgcggcatgaacatggttaatattggagtcgacaagccccatttcttctccttttaagtacatggacttcagttttcctgagtggatgccttcgatcatttcatgatttgtcattccgatttctttcggcaagtctgttccccagccctgctcatactttttgcgggctttttcatccgttactttttcataaccggggaagctgtcaggcatactgccgaaatcactggctccctgcacgttattatggccccgaagcggatatgagcctgcgccgggcttgccgtaatttccggtcacaagaagcatgttggaaatggccgtgctcgtatcactccctccgatatgctgggtgacacccatcgcccacagtgcgcacacgctgccggcttcatgaatcatccgggccactttgattagggtatccttgtccacaccggtatgtttttccgcatattccattgtataaggttcaaggcttttcacaaattcatctaatccgttcactctctccttcagaaatgcagtatccgccaaatcgtgatcaagcagatatttcgatacggcattcagccagacaatatctgatccggcacgcggctggaaaaacacatcggagcgctcggccatttcatgttttcgcaagtcagcgacaacgagcttctgtccgtgcagtttatgagaacgtttaatgcgtgtggacaggacggggtgagactcagacgtatttgagccgataatcagcacgagctcagctttttctatatctgtaatcgaccctgaatcaccgccgtatccgaccgttctgaacaatccggccgtggcgggagactggcagtagcgtgagcagttgtcgacattatttgtgccgatgacggctctcgcaagcttctgcatcacgtatgattcttcattcgtgcatttggaagatgtgataaaggcaagtgcgtccgggccgaaatgttcttttatatcggtaaatttatcagcgatcagctgcagcgcttcatcccattccgcctcccgaaacgagtctccttcccggataagcggtttggtaaggcgcttttcactattgacgaaatcccagccgaatttccctttcacacacgtcgaaatgccatttgctggcgcctcggcctgaggttctacctttaaaatgtctcttcctttcgtccatatatcaaaactgcagccgacaccgcagtaagtgcatacggttttcgtttttttgattctttcatcccgcatggccgattccatgtccgatatggccaaaatcgatccgtatccggtttcgaccccttttgtgatgtcaatcatcggccgaagcgtctcttggttaatgcctgttaaataccccgcttcgccctccatgcctttttccatcatggcattgcacggacataccgtcgaacaatgtccgcaggaaacacatgatgattcattgatcggcacatcctgatcccaaatgacccgcgggcgtttccgctcccaatcaatgcttaacgtttcggttacctgtacgtcctgacaggcttcgacgcagcgtccgcacaaaatgcactggtcgggatcatatcggtaaaacggatttgattcatctttaggatacggtttttgatcgaacggaatgctttgatgattgattttcatttcctttacggtattatgtacttcgcagctcccattgttgtaatcacagaccgtgcagtacaattcatggttgtgcaaaatgttgtccatgcccataatctgcgcttttttcacatcggacgaaagcgtatcgatgacatctccgtcctttatttgcgcggaacacgaacgcaccagttccccgttaacattgacgatacaggtatcgcacgtttcaatcggcccgagactcggatgataacacacgtgcggcacgtcaattgaactattgttcaaaagctgcaaaacggtttggccgtccggcgcttccatttcaaccccattgattgtaactttctttgtaccagccattttcttttcccctttctgtacccctctatacatcctctatgattcccagccggcctttcactaaaacatctcgtttatctcatgaaacatacgggtatgagcggtaaaaaggaggcgttcacatatgttgaagaaaaaaacactcgccacgggattatcggcagtgatgctcacgggatgcgcattcggcgcagaagcattttcggttacacagcccgtccatgccgcagccgcttcaaaaacggaaaatcaacgtgcacaagaactggtgaacagcctttaccaatcggcgtttaaaggggaaatgccgcaaaatgtgagaggcctgaaaatcaaccaaagcacaagacaggacgtttacgataaaatcggcgagccggaacaaaaagcagacagccgcaatccatttgatttatacagctggaacatgggaaaccccggttatggattttcctatcataaaaacggaaaaatctcggaaatacgctatttcggaacaggggtcgagcggcgcttaaacctcggcagcgtcacacctgacgtcttaagcaaacaaatcggcagcgctgacaaaatcctgacagtgcccaaaacgggcgaaacagattacgtctaccatacggggcagtatgagctcagcttcgtcatcggcagtgaccaaaaagcagaccacgtcaacctaaaagccagataacgcaaaaaaagcggcctcccgggccgttttttcatagacagcttttccatcgttccttacaatacatgggagtacaaaaaaaaggggaacagtgtgaagtgaatagacatccattgacatacggaatatgtaccgtttttatcatcgccctcggtttgctgtccagaaccgcatacatcaccgccctattgcccggcatcataaacgcttatttaggagatgccttgtgggcggcaatgatttttacaggatccgggcttctgtttcggaacatccggacggaaacagccgcatttttgagcctctcgttttgctgtctgattgaatgcagccagctgtatcacgcgccttggattgacgcaatcagaagcagcacgctcggcgggctgatcctcggctggcaatttgtctggagtgacattttcgcctataccctcggggtatgcgctgccgcatttttagaatgggccgtaaaaagaaaccgccagtccccttcataatcggagcatgccgccgatatgaagggataaggaggtggaagctatggatatccctgcgttatcaatcgctatgcaccaagcatctctggcgcagaatgtaaatatcgctttaacaaaaacggtcatgcagcatgcacaggctgcggcggaagaaacagtgaaaatgctgccgtcccagcacccgactgccggacattcaattgatgtgaaagtgtaaaaaaagatgccggatgataaccggcgtcttttttttgcccgttgtacgtacaccatacctggcatacaggaataaggtaaacggaaccaacatttgaaaaggaggttttcctcttgtacgatcctttctatcatgaatacacagccgagagccacgaacgggtgccatatcattatccgcggccgccttattatttccccagaccatatccatactatccgcggccgccttattatttccccagaccgtatccatactatccgcggccgtatatcccgttctatccttggtattaatgttttaaaagaaatgaccgcagacaggaggcttcccctgtctgctattcaactttgaccgacagaatatacgggagagcttgaactttttccattactgccgctttcccgcttttgcttttcacccttcccttcacttcaagcaccgccttattcaattcataggacgtaataagaattcctttttcctcaagagaagttaaaatatcatgcatgacggctttctcctcaatcctgaaactgacagacaaagaatgcgccgccggtttaaacagaaaatttaacagttcaagcccgattaacgccaaaatcgtgccgctgatgccgatgacatacatacctgccccgatcgtcagcccgatgcccgacgtagcccaaatccccgcagccgtcgtaagcccccgcacgacatgccgctgcaaaataatcgtgccggctcctaaaaatccgacgccgctgacgacctgcgccgccacccggctcggatcaaaggacgtatggctgttggataacaaatcaaaaaagccgtatttggaaacgatcatcatcaaggcgctgccgacggccactaaaaaatgcgtcctcaaaccggcttccttcgccctgaattctctctccaatccaataagagccccaagcagacctgaaaccgccagacgaatcacaaaatcaagttccatccgtctctctcctttccttatcttcttacccgcttttacaccccaatcatgctgtgtatctttttttaaaatgcaccgactaattgacataaggaggttttatgaaatatattctgtggttttttatattattgttatttagcttatttattttgggaggatataaagcatctgtttctcacccggatttcccggttccattatttgctatgcacagcaaaacaaaggaatatgaaaaaggaaaatacgtttcaaactatacataccgtttcgcaaaagaagaagaaggtccgagcggtttataccaattggaaatagccgaaaaaggctggaaacttaaagggcaggaaggacttatcaaaacctatgaaaagcgaggagaacgtgtttcactttttttcggtacgggggaaataagcgtcattgaagaatgatccttctcaaaagacaggctgaaatccgcaaacggcatatcttttacgactccctttatctctgcgaatctataaattcaaccaatatctcaattaaggcgaacactttctaatccaaaaaatgccgccttcaatgagaaaatcattatacaaaaacaaaagcgcaactgaaaaagaataagcacctcataaaaaaagccctctttttaaaaagagggctgcagaaggaaacaggtaattatttatttatctaaagtgtattcattcacattaaaagtaagaatgttcccaaaaacaatatggtcccttctattttgaaaagggcctatattattatagtgcttctcgataacatatctagataagcctattccagaacttttttgatcataccatctgataaaatctttaatctcttccattgaaagatcaaattctttctcaagacctgtggtcattgtaacaagaagaattgcccgattactggcgggctgtttatttggtggttcgtcaggattctttggttctctatctttatcctcttcggtttttaccggagtaagagcatgcagatattctaatgcatatccagacggcgttagaccgccaaaaagataaagattgtctccaactgcggctattctggcatcatatctttcaaaaggatagggtttttctacgctaatttcatctttaattggatcatatacttttgttaaaggctcaatcacacttggattttttctaccgccaataatgtaaatcttattattaaggacagccgttgatgtattttgcaaaggtcctaaaaattttttacgattccatctatccaaaacaggatcatattcgtgaatatattcgtttagatcgcttctgatatgtccttgaactacttctttagtttgcccaccaactaaataaatctttccgttaaaaacttcagtttctgttgcatatatattaattgggggcgcttttttaacactccaagttttggataaagtatcaaaagcataatgttgcgaatgagcagcatcggtgtcgaatcccccaatcaaataaattgtatcgttaataacagcggctgatgcatggcaggtcggggtcggaatatcaggtgcacttccccatgtatttgttttagtatcataaacatctacagagctgtaaacatttgctcccttataaccgcccaatacataaatataattacctatcactgctgtacatgaacctaccctgggcgtgggtatatctaatccttgcgtccatttttgacttatggtgtcaaaactataatttttgttatattcttgattacgtgcacctcctaatacataaatggagttacccacaacagctgattcaaaagcataattaggttcaatcatatcaagtaatcttgtccacttttcatatttctctgtcaatttattcatccctctcatctttgtgataattctcatttatagatggcgatcatatgacaagagattcatttaactaagcgatccaagatcacttacttttgatcaaagaaatattgaaaaagcctctcaatttaaaagtgatttggttttcacttctcggttatcggccagcagtttactaaaaacttagtacataagagtaatatagaataacacctctcgatgaatccttaatgaagctcataatagcttcaatcaaaggcatatcacattaaagtaaagatcactctcaatccaactgcatctctcaaacagaacgtccggcaatcacctcaaaaaacgaggtgaaatctgtcagtatcccgtcatccgccagctgtttttcttcaaatagcgcgcggttttttccgagcgggtcaatggccataatcttgcctgcacctgcttttttcgccgctgtgagccccgaaaaggcatcttcaatgactaagcattcttcaggcctgaggcctaacttttccgatgcgatgagaaaaatatccggcgccggttttccggggaagctcccgtcatcaaacgtgactttgtcaaaatcaaaccaccgatccaactgaaagacgtcaaagtaaaactcgacattttcctttaccgtagccgtggcaatggtcattggcgtttctgattttttcagatggttcaatacgccggtcagtcccttcgtcagctttaactcatctttgttttcaaggcataattctctgtagtaggcttctttttcaaaagacagcttcttgatttcttcatttgttaaatcgccggaaataaaatacgtcaggatttcactgtttgttctcccgtgaatgttaacgaaaatgtcttcatcagaaatggttttcggcgcgtattttttcaccatgaaaaaccatgctttttcgtgcagatgcgaatcttgaaacatcgtgccgttaaaatcaaaaataacccctttcatcgaaccgcccgccttttttatttttttgcgattttgacatctacatattgctcgtaatgaatttgaacatctttcatcactttatcatccgtaatcagataatccatatcgtgcaagttatagaacacgtaaaaatcttcccggttgaattttttattatccgccagcaaaaatttcgtccgcgaattattcagcgcgatttgatgagcttccccttcttcaatgctgtaagaagaaatctcatcattatgtatgccgttggcgctgatgaaggctttcgtaaaattgaatttctgcagattgccgttcacgatgggcccgacgaaggcaccggtattttttcggaaatcgccgccaatcaggatggtgtcggcagtgtcaccatgctttaaaatatcaaatacgggatagttgtttgtgataatcctgattcgcttatgcagcaggtgtttggctaaaagttcaatcgtcgtgccgggccctaaaaaaacggtatcgccgtcatttacataggaagctgcgagttccgcgatcttctccttctcctccatttgaacacccagtttttcattatgcgataattcgtgatcaatggaataagaaatgctctgtgcgcctccgtgaatacgtacgatttttccggctttatccagctcgtccagatctcttctcactgtcatatcagaaacatccagttcatcgataatatcactcaccgtaataaacccccgcgagtttacgatatcgatgatttttaaaagacgctctttttttaacatgttcaatcatcccctcaactttacacacaatctaacacaccgcggcactctggtcaacaaaaacaaacactaacaaacaacataatcaacatataaaacaacgaaaaacttataaaacccctatgaaaacagatgttatttctttatgaagctattgacaacaaaaatgtatgcgtttactattaaacaaaagataacaattacaaacattaacaaacttcaattcacacattggcgaaggaggattcagtaatgctcaaattacctcatgactttattttcggcggggcgactgcggcatatcaagcggaaggcgccacaaaagaaggcggcaaagggcctgtggcctgggatgaatttcttgaaaaacagggaagattcagccctgatccggcaagtgatttttaccgccagtttccggaagatattaaactatgtgaaaaattcggaataaacggcatccgcctttctatagcctggacgagaattttccctgacggcacgggtaaaatcaatcaggaaggtgttgattactatcatcgtattttctcagagtgccataaacgcaacgtcaccccttttgtcacgctgcatcatttcgatacaccgaaaggattatttgaccagggagatttcctcaaccgcgcttcaatagaagcgttcgtcagctatgcggagttttgctttaaagaattcagcgaaatcagatattggagcacgtttaacgaaatttatcccacagccaccaaccagtatttactcggggttttcccgccatcaattaaaagtgatatcacaaaagtcattcaatgcctccatcacatgatggtagcgcatgcgatgaccgtcaatctttttaaagacggcggctatccgggagaaatcggtgtcgtccactcattggaaacaaaatatcccgccagcgactcagaagaagaccgccacgcctgttttctggatgacgcgttatcagtgagatttctcctcgacgccacctacctcggctattattctgaggaaaccatgcgggctctggatgaaatctgtgaggcaaacggcgcttcatacgagttttcagacagtgactttgacgtgatgaaaaaagcttcaacgcgcaatgattatctcggcatcaatcattatcaatgccatttcgtcaaagcgtacgacggagaaaccgttattcaccataacggaacgggcgataagggcacttcggtctataaagtaaaaggaatcagcgaaagaatttacaaagaaggcctgaagcggactgattgggactggctcatttatcctgaaggcatgtatgacatgctgatgcgcatcaaacgggactatccgcaatataacaaaatgtacattaccgaaaacggcatgggctataaagatgagtttgaagacggcatcattatggataaggcaagaatcgactatttaaaagtctatttagaagccgtcagtaaagcgattaccgacggagtcaatgtaaaggggtacttcttatggtccttaatggatttattttcatggaccaacggctacaacaaacgttacggtcttttttacgtcgactttgacacccaaaaacggtatccgaaagaatcggcctactggtacaaacttgtaagtgaaacaaaaacaatcatttaacgatcatacatggtgaaaagagtctcttttcatcatgtgtgccgtctttaggaggtttttttcatgacaaaggaagaattgcagatgctcggttttgaaatcgtcgcctatgccggcgacgccagaagcactttattgaaagtcctgaaagaagtccgtaccggaaacttcgaaaacacggaagcagcattgaaaagcgccgatgaaaatttaaccctcgcccacaatgcgcaaacgaaaatgttagctgaagaagctgacggcaaggacatggaattaggatttattttcgttcacggtcaggaccacttgatgacaacccttttgctccgtgatcttattcaggattttatagaactctaccgaagccgccgataaggagtggaaaaatgaacggtatcatcaagcaaatcgaaaagggaaaaccgttttttgaaaaaatctcaagaaacatttatttaggcgcgatccgcgacggcttcttaacggccatgcctgttattttattcgccagcattttcatcctcaccgccgctgtgccggaagtgttgggtttcacttggcctaaaagtgtttctgaatggctttggaaagtttataactattcaatgggcgccctcggtctgatcgttgcggcaacaagtgcgaaatgcctgagtgaatcaatgaaccgaaaaatgccgaaaaacaaagggatcaaccccgtttcagcgatgcttgcttcagtcgtcgggtttctcattttaagcgtcactcaaatcgatggcgggttctccacggaatacctcggcacaaaaggtcttttagccgcttttgtatccgctttcataacagtgaacgtttacagattctgcgtgctgaaaaatattacgattaaaatgcctaaagaagtaccgggtaccatttcacaaacatttaaagatgtttttccgttcgctttttccgttttggccatggtgatcgttgatttattgatcaggaacacgctgaacgtatcgtttgcagaggctctctcctctctcttatcgccgttttttaccgccgcagacggttatctggggatttgtgtcatttggggaatgatggcgctgttctggtttgtcggcgttcacgggccttctattgtggaaccggccatcgcagctattatttacgcaaatgtggaggcgaaccttcagcttcataatgccggtgagcaggcgtccaacgtgctgaccgtcggactcgggaacttcgtcggcacaatgggaggaaccggcgcaacccttgtggttccgtttatctttcttcttttcgcgaaatccaagcaattgaaagcagtcggaaaagcatccgcggttccggtgtctttcgcagtaaacgaacctctgctctttgctgcgccgatcattttaaatccttattttttcattccgtttgttgtaacgccgatggtgaatgtctgtctgtttaaattttttgtggatgtcatcggaatgaacagttttatgtatgttcttccgtgggccaccccggcgcccgccggcttgattctcggaaccggcatggggctctcggcttttgtgctgacagctgtattaatcattgtcgatttcctgatatacctgccattctgtaaagcttatgacaaagtattagcggcgaaagaagcccaacacaccgagcctgaaaccgcgccgcaaacattacagcccgccatggccggcgcctccgaagacgcgtcctccgtcatcagcacaaatcttcaggaatcctcatccgccttggaacacagcaccaatgtgttagtgctgtgcgccggagcgggaacgagcgccatgcttgcgaacgcactgacagaaggagccgaagaatataacgtgccgattaccgcctcagcaggcgcctacggatcccattacgacatcatgaaagacttcgatatgatcattttggctccgcaggtcggctcttattacgatgacattaaagaagatgcggaccgcctgcaagtgaaactcatcgcaacgaaaggagcagaatatatcagcctcaccagaaattcacaaaaagccattcagttcatactggagcatacctcaaaatagaatcggaggtttatcatggaagccaaacttttgaaatcaagattcgaagacattttcaagagaagtaacggagaactgtttttcgcacccggccggatcaacctgatcggggaacatacggattatataggcggccacgttcttccatgcgcgatcacgatcggaacttatgccgtatgcgcaaaacgcggagatcaccagatccggttatactcagaaaactttcctgacagcggcattgtctgccttgatctttccgccacagcatacaaaaaagaagacggctgggccaattatccgaaggggatgatccattaccttcttaaagccggcggccaaatagacagcggaatggatattctttttcacggtacaattccaaacggagccggtttaagctcctccgcttctattgaaatgttaacaggttccattttaagaaagttattcagcctggatgtttccgatactgaactggcgcttatcggaaaaagagtcgaaaatgaatttatcggcgtgaattcaggcattatggatcaattcgcagtgcaaaaaggcaaaaagaacatggccattctgttaaactgcgataagcttgagcacgaaatgattccggctgcttttaacggatataaaatcgtcattatgaatacgaacaagcgccgggagctggcggcttcaaaatataatgaacgccgcagcgaatgcgacgaggctctttcagaactgcggcaatatcggaatatcgcatcacttgcggaattgacgtcagaagaattcaacgaactcgaatcccttctctcctgtgaaactttgcgtaaaagagcccggcacgcggtcaatgaaaacgagcggaccctctcagccgcggaagctctcaaatcgaatgatttgaaaacgttcggcgagctgatgaatgcgtcccaccgttcgttacgcgatgattatgaagtgaccggtgacgaattagacgcgctcgctgaagcagcctggaaagaaggagcactcggagcgcggatgacgggcgcggggttcggcggctgcgccatagccattgtggaaagtgaagaaaccgccggctttatccgggccgtttcatctcactaccgcagcaggacaggtcttgaagcttctttttacatcgctgatataagcgatggcgcggctgaatggaggggaaaataaatcatggcgattctcgttctcggcggagccggctatatcggttctcatgcggttgatcaattattaaacaaaggattgaaaacgatagctgtggatcatctgcagacaggccaccggaaagctgttcatgaaaaagcagttttttaccatggagatatccgtgacaaaccgtttcttcgctctgtgtttgcgaaggagaacgtaacaggcgttctccattttgccgctcaatcccttgtcggcgaatcaatgaaagaccctctttcatatttcaataataatgtgtacggtacgcaaattacactggaggtcatgcaggaattcggggtgaaacacattgtgttttcttcatccgccgctgtatacggcgaacctgaaaaagtgcccatcacagaagacatgccggaaaagccggaaagcgcatacggcgaatcaaaactcatggcagaaaaaatgctgaagtggtgtgaaaccgcctgcggcataaaatatgtctcgcttcggtattttaacgttgccggcgcgaaaacggacggttccatcggagaagatcatcatccggaaacccaccttatccctatccttttacaaaccgcgctcggtcagcgcgaggaggttttgatattcggcactgactatgatacaaaagacggcacgtgcatccgcgattatgtccatgtttccgatttaatcgatgcccatattctcgctctggaatatttgcaaaacggcggagacagcggcattttcaatttaggatcaagcagcgggttttccgtatcagaaatggcggaagcggcccggcaagtgaccgaaagagacataaaagtaagagcggccgcaagaagacccggtgatccaagcaccctcatcgcttccagcgataaagcgcggaacattctgggctggaatccgaaacaaacggacatatcggaaatcattgcgtcagcatggaattggcatcggcaacatccaaacggatacaaggacaaatgaaatggaggcggcggtcattgaagtttttgaatcagtggcagggtttctgaaagaaagcactgtcttaggcgacataaatgaaacagatgtgatttacacaagaaacagacttctcgatctgctcggactgacggattatgcagaaccgaagcatatcaagaaacaaaacaggcttcactatttggacgaaatggtgaaagacgcggtaaaacggtcaatcattaacgatacgccggctgaaagagacatgctgggaagcagaatcatggacgtgatcacgccggccccttctctgatcaatgccgcattcagcaaattgttatcagattgcccgaaaaaagcaacagattacttttaccgactgagccaaaacaacgactatattaagacgcgggccattcgaaaaaatatcgtgtaccgctcaataacaccttttggggaattggacatcaccattaatttatcaaagcccgaaaaagaccctaaagacatcgccgcggtaaaaaacagtccggaaaaccggtatccgacatgcctgctctgtatggaaaacgaggggtatgccggaacaccgcatcaccccgcccgttcaaatcaccgcatcatcaggcttgacttagcgggagaacagtgggggtttcaatactctccttatgcgtattacagcgagcacgctatctttctttcaagcgtgcacaagccgatgaacatcagccgtgacagcttcagaaggcttctggccataacggaaatcttcccgcattatttcgcgggatcaaacgcagacttgccgatcgtaggaggctccattctttctcacgatcattatcaaggcggcgcccatgagtttccgatggcaaaagcgggttccctctacccttttcatatacgtcattttccagacgttcaggccgaagccgtgaagtggccggtatcagtgatccgccttcgcgcaaaagatccggatttgctgacagatgccgctgcgtatgtttttgaaaagtggcgggaatattcagacgaaaccgtcagcatcatcgcaaagacaaatgaaccccataataccgtcaccccaattgccagacgcaggggaacggattttgaaatcgatctcgctctcagaaacaaccgcacctccgaaaattatccggatggcatttttcacccgcatcaagatgtgcatcacatcaaaaaagaaaatatcggtctgattgaagtgatgggactcgccgttttacctccccgcctgaaagatgagctggcagaagtgaaaaagtatttactgaatgaacctcatgacatcaaagacattcatcttccgtgggccgaaaacatcaaagcggatgaagacgtgacaccggaaaatgcagccgctgttttacaaaaagaaaccgcgaatgtatttttacgcgcgctgaccgatgcaggcgtttttaaaatgacacacgaaggaattcaggcgtttcagcgtttcacgacgttattggagaatggcagctgaaacattcagagtgaaatcaatcaacaatcttttttatcaggaggtattgtgatgttcaaaaaccgattgaaacgtgtatttgtaaacgcaatctgtctttctctcattttcactgcttttacattctttgagaagtctcctaaagcaaaagcggatgccccgtttgcctatggcgctgatataggatggctgaaacaaatggaggacgaaggtgtgcgctggctggatgacggcggaaaacagaaagatgccttgcagattcttaaagatcacggaataaatgccgtgagactgagagtgtttgtgaatccgccaagcagctattattggctgaaagacggcacaacatggaccatgctcggctatagtgacaaagcgggcgtacttgcggcggccaaaagggcaaaagcgttaggaatgaaggtaatggttgacttccattacagtgatgtgttcgctgatccaggccaccagatcaagccgaaccaatggaccggctattcaaacagccagctgcaggcagccgtgtataaccatacgtacgatgtcatgaaagaacttaaaaatcacggcatctcccctgattgggtgcaagtagggaatgaaatgaattcaggaattttactgcccgacggcagcacgaacgatttcagcaaattgaccgccttactgaacaaaggctatgacgccgtgaaatccgtcagcccggccaccaaggtcatcagccatttggcacacggcacggacaacagcctattcagatggtggtttgatcaattctttaaaaacggcgggaaaaccgacattatcggcgtttcgttctatccctattgggaaggtaagccgtactgggagctcaccggccatttatcatctaatttgaatgacatcgcctcacgctacaacaaggaagtcatggtggttgaactgggcggagatgaaaataatccgaaagattcctactggaccataaaagacaccataaaactggtgaaagccgttccgaacggcaaaggaaccggcgtattttactgggaacccgaagctcactccagcgttctgtcagacgcgtatccattaggcgcaaccgccaaagtgtctaaaaacgtcttgaaatacacaaccgcaatcgacgcttttcatgatgccgcaacaggaaaatgattgatgcgaatctcaagcaggctcattgcgcagcctgcttttttataaggctgtagtgctggcctgttatgaaacagagcaagtaacgaatacggaaagaaaaatacccgaaaaaccacgtttcggttaaaaagccgctttttaaatagaatactttttctatccccctccttcttaatttctgcgcactatctctcagttcctaaataataactttacgattgttgaaaaagaaacaaacattttataatattgtgtaagcaccaccgagcaggaggacgggacatggacaaaaaagaacagctcctcacggatttcagggacttttttaacaagatggtgtggctgaataggctgaagatggaagaaagccttaaggggcataaaccttctgaagtgcattgcatcgaattcatcgaaaaaattgaagacgccaatgtgacaaaacttgcggagtccctttatatgacaagaggcgccataagtaaattaacgaagaagcttatcaataaaggccttatcgaaagctatcagaagccgcttaacaagaaagaaatctatttcaggcttaccgaacaaggaaaagtcatttataaaattcacgaggaattgcacaaagagtttcaagaacgggacaaaatcgtgtttgaacaagtaactgatgaacaatttgacacgatgctgaacttcgtggaaacatacagcaggcatttggattcagaaataaagaaacttggtgcagacatgaaatcggaataaatatgaataaaaccataggcagcccttctccatgaaaacgggctgcctttttatatccctcttattgttgacaaagaaacaaaatcactctattattttgttgacgaggaaacaaagacagcaattttgagaggagagtaatatgtcaacacataaaagaaaggaacttcgggtgccaaaagaagttctcacagccgcctgggctattgcactgggagcaatcgctccaatgcttgactctacgatggtaaacatcgccatcgacaaactgaccaaagacttcaacacgacattggataccattcagtggtccgttacaggctatgtcttagcacttgcgattgcagtacccgtatccggctggcttatgaataaatataacggtaagaaaatcttcatcggctcagtcatcgcctttggtgtcatttctgtttttgcggggatgagccgtgacgtttccagcttcatcttcttccgtttgcttcaaggattcaacgccggcattataactccgcttatgtcaacactcttggttaaaacggcaggtccggaaaacctgggaaaagtgatggcaatcgtcagcacccctatgatcttcggcccgatcttaggacctgtcatcggaggcttcatcgtccaaggcgcttcatggcattggattttttacatcaacgtgttcatcgttttgattgctgcaccgcttatgatgaaaaccattccagactttgaaccattcaacaaagatcgtaaactcgatattttcgggattatcaatttgtcattaatgagcgcggcattgatgtacggtattacgaaagcggcggatcatgcatcatttaacaatagctacaccattttatgggcgggtatcggtcttgtttcagcagccatttatcttgtatataatctgatcaagaaaaaccaaaccgtgctgcctatgaatttgtttgcaaacaagagcttcttagcatcttcgatcgggttgttcttagcgaatgttgccatcatggggccgatgttaatacttccgctgttttttcaaaacattcgtcagttcacggcagtcggagcagcactcgctttaatccctcaaggagtcggaatgctcgtgactcgtccgctgatcggaaaaatgattgataagatcggtgcgaaatacgtggttacggtcagtcttgttctttcgctgatcggatctatcccgcttatttttatcaccgataacacaagtatgatttggatttccgtcgtattatttatccgcggcaccagttttggaggaattatgctcccattgatgagtgacgcttatacaggtcttgacagcaaacagcttccggaagcaggtgtcggtattcatatgattgaaaacctcggttccagctttgggtcagctgtgatcgcaaccgttaccgcaactgtcatacaaggattgcagccgacgattccgaacagtttaaaaggctaccatgccggattcttagtatccgtcatcatccttgcggccatcttcgttccaagtctgttccttacccataaaaagactgcgatataaagaactttttaaagtaaaaaacccttgcacagcaagggttttagtgaatgaaactgatgatggttgccggcagagtcagccaacaatagacaaagccttttactcattcacattgcttttcattaaccattctacttccgttaattcttgtttttgaacgtcttttgtatgttttttcgtaaaatggactttaacagcttcttcgttttcccaaatctcccaaagcatgattttgcgttctgatggttcgagcggataagcatggaactgaatacagccttcttctttgttcgtttcttcctcaagttttttgaactctttcattatttcattaaggtctttatcactgatgatttttaagcatgccgttatgtaatgcatcgaaattccccctcttcccatctttttatgactttacattataacatttatcgaaaaacgaaaccggcataccgcattctcaacatataaaaaaccgtccataaaaaatgaacggcaatgtttatttaagagcatttagaccgacttttgcagcctcagcgataagagcattattataattggcatcttccgtaaaccggtttgacaggattgccaaaacaattggggctctgtcaggcggccaaacgatcgcaatgtcgtttcgtgtgccgtagcttccggctccggatttatcgccgacttcccatcctgcaggagcgcctgcccgaatcagttcgtcgccggtagcgttgccccgcatccaatctgttaaaatcgtgcgcttgtcagccgtgagagtgttacccaaagcgaaagtcttaaggtcagttgccagtgcttttgcggtgcttgtgtcacgacgatccccgggaatcgccgagtttagatccgtctcgaatcgatcagcttttgttacatgatccccgatctgtttcaatgacttttcaaaacctttggggccgccaagctgctgcagcaataggttcccggcggtattatcgctgtaacggacagcggcttctgagatttctttcaggctcatgcctgtatccaggtgtttttctgtgattggagaatatgtaactaaatcgtctttgctgtagcggatgatagcattaagtttttcatttgagcttgtcttcagaacagcagctgcagccagaactttataggttgatgcgtaagcaaaccgttcattcggccgataggcgattgtcttgtttgaacctgtatcaatcgcataaaccccaagcctggcatcaaattttttctcaagctgaacaaatttttgattcgttatacagcttgtcatttttgtgttttctatagatttcgcttcagcatgcgctgagccgaataaaggattgaaaccggtaaagcttaaacataaaagtccaatgcatagtccaacttggattcccgctttatttttcacattcaggcctccttattataataattttgtatacatcttctaattaacattacaaacaggatgaaagtcaatatatttcctgtgagatgattaaatcctgcattctgactcctccccttattaaatgcgccgccctcgccgcgtctgaatgtttgcatgtccgcttcgtgttcatcatctatttgctatccctccgtgcaaataaaaacggacaccaatcagagcatagtgagctgtgcaatgatcagtatccgcaggctttccgtcttggacctatatatgtttctcttacagactataaaaatcataaggtaagttaacaaacgcattaccttaatctcgtcagtcaaaaaattatatcattttatatatttcaataagattatcatctggatctctgaaatgagccactcgtgcacgccattcctgacgatcatgtggttcattgacgcatttaatcccttgcttgtgcagatagtcatacgttttatcaacatcttctaccttaaactgaagcaaaaatcttgattgcgcatctccgtctaaagattttctttcttctccaactatttcagccatattttctcgagataaaagctctattttcgtttctccattatcgaaaagtgcatattccatttccttctctaaccaactgattggaagtcctaatgaatctttgtaaaactcgacgcttttcttaaagtcattaaccaatagtctaatttgcagcaacttcatattgaacgcctcctatcattttactggccattcatttaatcatacaatagggacctgacagcattatgtcaagtttccataaatttttttccatactgcacctgaatttcggatgaaagccttcggagattcatgaaactgcgtttgatcaattcacattcttggtttgaattttccttcacttcaccgtggaggctccggccgtgtaagtcgcgcatccgtaaacatccggccgccgctcctgtaagtaacacaactgataaatgattgactgaatcgttttttcaccgtcattgcttcccctgttttttgtattctgcgatttccctaggggtagccttccggactccgtctgtgtctgtcctgtttgccacttgaacgccttccatgttttttatctcgctgactactcccaaatgctctaaatacacatgatcaccaatcttgaaacgattcagtttagcccgctcctcagtcatgctcctgtattcagtcgcggctttcatttttaattcagccagacacatttgacaaagggttactgttacagaattgccgttaaaatcagtaaacgaaaccgctctgacagattccttttccgggtgcatcgtgcatgttttcttcataggtgatggccgtgtaaattcaatcattccgcttcctcctccataaaagtcttttcgtccctctgacataactcccgatgaacgggaagttccatacacccgcattcaaaccgtcacaattacatggaggttgccttcccttcgccgtctgacggattttcatacatcctgcatagctgtaagcctatattcctttatattcccaatgcttgccgcacttccctgttaggatgaaatttctaaagctgtggaccagttgccgcatgttggttccatgcgacaagcctttgggcagccatatcccaattcatatgggtaaatttcagccctctaatatgtgtgtatgctttttaaaggaggtgcatcacatgatgttctaacaaccgattcaacttaaacagagtgatttagtcgacaaaaagatttgtcgagaacaaaaagaacggtgaatctaaaaaacaattgatctttctgaatatgaattgctagccaacgcatattccaaattaataagataaataaaatagaccccctcaaaatggtgagggggcctgtggccgatatttctttattgaactccaaacgaagagatgcaaaaatggattgaagaggtgatgattttgccgccatgttaatgtacaaatatttaattaaaaagggaaagaattaaataaggggttagattgtttcaaattaaggtccttcagagcgatggagaagaaacataaagaacttgcttaatgcggattcttcgactttgtaagtccactgcaagaaccattttcttttgtcaccttctccgcaacctttttaatcacacccaacaactcgagcaaaagttcattgtcgtcttcttccaaagttattaaagaagagatatgttttttagggatggcaacaatatgcactggccaaaaaggtcttgtatgatgatacgccaatacattctcggtttctaaaactttatttacttttgtttttccgcttaatacttcatcgcgatgctctactttatttttcacctttatcattaaaataagagaaccacaataaacttatgaacccagcagctcctataattgtagatattatataagtccaattaagtaaatccataagctttctcccctaagaaaaattcagatccctctaaataaaattcgtattttataaagacattatcctcttaatagaggtcatgtcagttatttgtattggtaataaacacccttcttgtttagcttatcaataacttcgtctttgaatggtatatctccgattattgcatatctaactgtatagttacctgctttgatatcttgaaaagacagattggtttttgttttcttggtttctgcttccggttggagtctaaatagtaaactccttctgtaatctttaaagtcgtttatttcgcattcattgacttttgcaaaatgttcaattaatcgttccattttttccttactcgaatacaattgtgtgaaaccaaagtgatgaaaagcgtgacagtttgcacaaattaaatttaatccacttaatgtgaccacaatattttcaaagtcatagtcctcgatctcgtgaagatgaagattccgcatttcgtctggttgaggggaaaatccacaaatgctacatacaggtgtatccttttgtaatatgtgatccctgattctataccaaagtgattgaccaactgctttccttacagttcttccatgaaataaagaaggttttgcatcaatctttagtttgaagtttgagtatttatccatatgtctccctttaaaacaattatttaatttcaatgtcaaaaatttggattccaagcaaattcaatgttgccttctgttcttacaactaaatctttgcataatctctccttgttgaccttattttctttacagttgaaatattgagcttgtgcaataaagttatcattacttgacattataaattttttacggtcaccccttcttccaaattccttgaaaatatctataaatataacatctgccggcatcttaccaaactttttatcgtgtgtaatctccggaaaattttctaaatttctaactttgcttatgatttgttcaatgttctttttcacatgatttcggcgcttggtattcttcatatagacctcaagtttaaaccgttttaaattgtttgtacttgtgtctttaatattctttacaatatactcttcttttttaatatcatgataataacactgcaaagtataatcttcgctaactgtattatcttctttaaaattcaaaccaaaaagactgtttccactaattttacgaactaaggactgtgcatctactttgttttgaataaatgcaataatatctgccgtttcagtaagtaaaaaagaattaatttgtttatcgttattaaatgtaaggaatagcctctctgaatcaggataaagtatagctaatttaatgaaggtaaagataccgaattgcaccaattcatcattcgaaggaattacatcagtagaaaaatagaggttgacttggttgattacatcatctatgtccaaaagatggcatcttaaattataggtagacatctcaaattttatccaggattgaaaaacaatatcggttttatttaaaccaacagcctgaacaatacccttataattcttcacattaaattttataatgccggccagtataccattaaccaaatcaattattttgtatatctttctcctgaattgcgaaacacttacttccttactttggggcttacccccggtattaaagttaaagataattgtacctttctcttttagatatgtccctccatgattaatggcatttctaatatctacatcaatttcctctgttaaaattgtacacccttttgatttaagtaagtttactaagggtcctagattattttggcttaacaagtctttctcatctatagtgttaagcaaatttctaagaaatttatatagattcccgattactccttcaactaacgaattatataatggcaaatacttgacttgaatttcaatgtctctaggtattattgttttattaaataaattcagcgtattcagtacacgatcatatgatgaaaggcttaaaaaaaagtgaccaagactttctctgaaactttcaaaaaacaaaatagtgctatcattcttatattttacttcatcaattaaattgtaaataaaatctttaatatctttatcccaaaactttttttcctcatgaaatattaaatcataaattaaaggaagccatgttttgggtatatactgaagctcctcaatatcttcttctattctttccatgtacccctttaaaactaattcactatcaaaacccataaaatctaatgactcaaatgccgtttcaatgtattcacggttcaactattttctctccccattccttattccaaaagtatgcgaacttgcaccttctttatcatgttctgtcttataccttatttgctccctatattccctttgtatttcatcttttttcttatccatcttacttgacccctttcaaaataaagtaaagccaagcaattctgaattatttttattcctttcttatgactcttaatttaatccattcttcatcatcagattatggttttttggttgttctataccactcgttaaaatgagcaactaactgaaccattattttcttagctcgtcctttagaacccatgcctaattgcgtaaattttgctgtttagcggatctccatccccaggcttatcaaactgtattagagcaatgtagtagctcctcattctatgccaaaaagtctatagagccgccaaaatgatctcgatagtggttaacataaatttaggtttaaaccccttggattttaaataagcaggaattgcttaagtgccaaattcttgtcctatttgacctttttccttaagcacacactataacgatacttcactcactttgtatacaattttcatcctttaatgctctgctttattttcacttttgttattaagataagaaaaccacaataaacatatgaacccagcggctcctataattgtagatataatgtaagtccaattaagtaaatccataagctttctcctctaaaaaaattccaatacgtctaaataaaataattatttcataaccgtaaggaattttaacattttatgttttttcctgattaataaattctttattcttcctcaaatttatttattctgcttaacattctcctatcatttttcgaagctctcttcagcgatcttttctcatatgatgtccctttagtaatcacaacaaaatcagaattattttgcacataaacttgggagtcagatgattcatagtaacccgtaacattttctaaaaccgtcttggaattgtctttatgatatagatcatagttgaccggcggcctgctgattgcaaatttcccaaaaacagcaacatcatccttaccgggagtatggctcgctcctttaataaatatgacgctaaatattaaaatcaaaaaaattgcaattaaagttcctgcaaacataaatttttcatttcttttccagttcaacataaacacccttttctttatcatgccgtgttgatataagtaaatttcacaatttatgtactaacaaatttaaacaagcagcttccattcaacatacttaaatcgctgctgataaaggtcttccaggattgatgcccattcaccccagccttccgcaacaatgcttttttctctccatcctcaatccgttcacttcaaagttactcactcttccgaaagtgtttttacttagagctcagttacttaaccacaactttctgtacaagaatagagtcccaaagccaaaagatcagagcaaataatacgctgaataaatatatctcataactcgctagtatagaccctattgggttataaggttcaaagagaacggtcatgattagccatgagttaaatgaaaatactgtgtatattaaaagatatttaaaattgaaccttctaggttttcggtttaagaaaagctgcaatggcaattcaaaaattaaataacatgtcaacatgatcccgctaattataagataaggaacatattcggcttgatgcagggtgatcacatatatcagtgtagaacatatggccgacaaaataaggacagctaggtatcttactaccatcaaatctatctcccccttacgattaaaaaacaaaaatgcttgcaattgctatttttcgtaataataagatttgacccaaggatagattctgcccttattttcacaccattcaacaaatccctttgattgttcttctttaaacaacatccagtcattcaacaaatcttgataatagttaagttgttcgttattgctttttcttgtttgttgacattctatcttgttgttcaactgccgggacttagtaagaagtgcttgatcttctttaatatcgcctagatataaatcttcggatatgtgatgaaatgaataccacaaggcgttcaaatgaatatcgattaacgttaataaagataattgttcattacttccacctagtctaagtgcattattcaagtaatcgacacggttttcagtatttaaaaacacaccataccacctgtatggtcttggatcttcggggttactcttcatccatgcttcaagcagaggctttaaaaaatccatttccaaagggtgaacaagtatatggtgaatatcatctgatttttctaataaagcaaatagccaacaagcaaaattctgttgtgcatgattttcccacgtcttggcttcatcgataaacgaagataatgctttaagggattctttacgtaatcctttttctttgagaaagcaaaacttttcaaatgatgggtattcatctaatctgtcattttttaagatattagttaagatatttatcattgttcacatctctctttgtctagagtaaagacgtgtttatacttaaaccatttgaaacacggcatacaatgcaacttcagctacaaacaaataaatcatatatctagcataatttaatacatcttcatcagtatttttctcttttttaaaagtccatgcaaataaccctaatacagttgccactaatgcgatttctattattgttaatattgacataccttcctcctaaaaagaacagggtaaatagacttatgttaattttcatttaattaagtctcttcagtcaggatttatcttataaaaactttccatttcttcatgttcatcaccttcaatgagttcaaagctgcctggtacattatacattattttccgttaatatatcaattccggttaataaatcacctgcatcttgaattacgccattttcatcttttacacactacaattcattatctaaaaatatgctccaaccttttaaccgacttaatctttccaattcattcaaacgctaccgagtaattcctgcactccggtttcccatccataagctctcttctcaaatgcttaatcacataattaaaaggacaaagaagtgggtcaaatgattcattttaccattttagatagtacattgaccttattcctcattcctccatggtaaaatcttgttgaaacatttcgaatgaaaggatatggtcatgaaagttttcgaagcaaccaccatcctcgccgccgctaaacagcgcgcgggtgaatataaaaaactgcgcggtcagatgatcaatctgaaaaaagcgtttcaaggcatggctgatcttggtgacaatgatttctccggccggggcgcaaataatatcaaagcttttttcaaggaccaagcaggcgtcacagacagctggcttgatctgatcgatatgaaaatcgcatttctcacaagcctttccggcaaagtcgaagacgcaggtctttccgaatcacatgtagaagaatcttttcttgagcacgagctcacccatgccctcagtaaatcaaaggcgattatggaagagcagaaaaaggacatgcgctccatcctcggagagatcgaagacatcatctcgctcgaattattttcaaccgaaagcacggatcagaagctttcttcagctgataaaaaaagaagcgaaacgatacataaactcggcaagcttgatcacgatctaacgaaagaatacgcagaaaccgaagcaaatgaacattttatccaagcagatttccagcagcttcaaaacgcaacaggcaaaggaaaaagcgccacgccgcttcactacaacgccaaggcataccgagaaagcgacatccataagaagaaaggcgatatcgcaagacattcggatgcttatttggcgattaaaaaggaagaagcgaaagagcgggaaatcaagaatctgaagaaaaagctggccgatggtgtcaccgatccggatgagtatttggaaatcgcgaagaagatcggctatgaaaaccttgaacccgctcaggtgggatatgtgatgcagcttgaacaagcaaaacagctcgaagaagtcggagaaacggcttgggatatcgtcaaaggaataggcgtcggcctttatgatgtcgggaaagacacaataaccggcgtcaaagatctggctgtcggcgcatgggatttttaccatctctctgatgaacaaaaagtcgctaaaaccatatcggctgtattgaacacaccctcctacgcaaaaatcatatggacaaacctggcggattcatggaatgataaaatggttaacggggatgcgtattcaagatcacattacatcacctacgccatcgggagcattgtcggactcaaaggttccggctcagccgtaaaagtatcaagcaagctcgcgaaaacaggtgccgccaaagtggataacgtcttggaaggtggagaaaaagcggctgcaaaacatgtaaaaaccgggattgaaaaaggacaaaactacatcaattccttttcgaaaaacaagtacgaacccgcgcttgccggaatagcacaggatattgaaaatactcacaatgtgaagaatacccctttgttgaaaagtattattgaagatcagaaagagagtgttctcagtaaatctgtgacttctgacaataacggcatacatagtgttaaacaaggagacagcagtcctctcgcaccaggcggtggcttagctgctcatgaagcaaaaggcggacaccttatagatagacatgttggtaagactgatgaagagttattacagaggctacagataaacaagaagatacgggcctcttctagtttcactgataggccaactgcagaaagagtcgctaatgaaacattaactaaacataaaaaggaaattgaagagtggttaaaaagtgatgttaatgatccattaccgttaccttatagaggaaccgaagttataggtagaggagttcgtaaaggttcaaatgaagttaaagatatgactaatgctagaatagtattaaagaaaaatgaagatggtagctttatactaacaggctacccaacgaggtgatatataatgattgagattaaagtttctgatcctgtatttagatttctcggtggacatttccaccaagatatagagtctccggaaaatgcacttgatgaatatttaaatgaagcatcacaaaaactaaaagaaagagatttaatagcactaactgagtttgtaaatagtgatcattcagaagaagacaagaatgaatttatagaagaagcagcggatggcatatactttccagaagatgatataacaccattagaatggcttaagcaagtcactgaacaaattaaaaaacaccttaaaacaacatagttagaaaaagagccctcttttaagaagggcttcttttattaattcaatttcgctttcgtttttggtccgtaaatgccgtctggcttcaaaccatacatgagctgaatcgtactgaaacgttcagccgcatttactgatgtaagtgcatttgaataaattgcagaaaaaccctcctcgtcttgagaagggctctgacttatacttctttttctctaaatcagttcgaagcaaaaaactgatgccgctcaacttttcaatcgaagtgcttctcgggttctccaactatttgcccctatgcttttcttttgctttttgttttctgattaaatatttttgttcctttattttttctctttattttctattcagttgtttttttgtttcaagctcctgttttatcgctttttatgccttagttgatatcccgatatttttcatctctttagaagcttgtcgttgcaatctttttgggtttaatttcttagattttgctttaacacaaacctcttcttgtcagtgtgggagagagtctgtaaaaaaggaaagggtctccgcttattttaacaacacttcaagttttactttggttcaagcgcataaattccatcagcttttaatccattcatcaattgaaatcgaattactgcattcgctgtcttcgctccatatgcaccatcaatcccgaagttctttcgctttaatgaagggcgacagcgccgttcgaatctgttttacgctctcccctcggattttaatgggttttcaactttaaaaaaccggaagacaagaggaaggatgctttcttgccttcagatgaagagccccctgaatcacttctttatcatcgacggcaaaatgatagcttgtcgattcgctgttacccgacatataactgatttcattggcggccgcatgcgtcatttcctgtattgtgaatgattttcggagtgccgctgtatttgccataaaaaactaaatattccgtttttcaaatacaaaaaaacagctggattaaccagctgctgatcgttatcactttagccgctcagtgatacgaaatttctgtatttctctgaaatgaacaggtttcggcaaagaccgccgccttaaaggcgatgtttatctcccttgcagtatacagcgaatgtacttcaaaatcagcccaaaaagcagttccggccccaattcgcccctcgatgaatgatgacaaaatcaataaataagcattgtgggactcaaaggttccggctcagctgtaaaagtatcaagcaagctcgctaaaacaggtgcagccaaagtggataacgtcttggaagccggagaaaaagcagctgcaaaacatgtaaaaaccgggattgaaaaaggacaaaactacatcaagtccttttcgaaaaacaagtacgaacccgcgcttgccggaatagcacaggatattgaaaatactcacaatgtgaaaaatacgcctttgttgaaaagtattattgaagatcagaaagagagtgttctcagtaaatctgtgacttctgacaataacggcatacatagtgttaaacaaggagacagcagtcctctcgcaccaggcgggggtttagctgctcatgaagcaaaaggcggacatcttatagaaagacatgttgggaaaacagataaagaattaatagaaagactgaaaactgatcctaacccacatattacagcttcatctacttttaaagatagggctaccgctgaaagaattgctaattcagttttaaacgatccaaaaaatataaagaaaatcgaaaattggattgatgatcctaaaaaacctaaattaatgttaagatacaagggcgatggagaaataatcggcaaaagcgtatcaagaaattcagaactagtagaaaacgttacaaacgcaaaaattatactcaaaaaagataataacggtaactttattcttacaggatatccaaccaaatagaaagagaggaagtatcatggatgaaaggtatgatttcttagatgaattagaaaattttttaggtgcaacatttcatcaagatatccaatcccctgaacacgccttagacgaatttattgaggaaattagtaaagaaggtttgctatttacagtaaagtattgcgaagagtttctaaatagcgatctaactaaagaagaaaaggaagacattataaagtgtaatgcagaaatatatttcccgacaattggcttaccgcctatagaatggttaaaaagtgtaatagaacaactaaaagaggctatttaaaagaaacactgaaaggcccccattttatggagggtctttttatattgataccgaagtttttggctttcttatccggatagaaatgcaataccgacagtgcggtttggatctacttgacggcatcactagctgaacttttcaacaattttgaccctaaaaagagatacggacaataaatttctagccaaaaaatcaagttcgccaacaacttacgaatttgataaaccggctttattaagggaaattaaaaaacccttgcgtagcaagggtttcggctatgattccgactgggctcgaaccagcgacctctaccctgtcaaggtagtgattatcttctgagctgttatttttattcctgacaaatacttatccatcaagggattgcaaatttaggatctgatcatttctgattaaaaataatgattgttggcaggtttggacaacagctcgccaacaattttccactttaaaccagagattaaattcacaacatattctccgttgataaaaaaatttttgctacaaggaattcttttagactttcaatttttggtttactttcttttcgttaacctttctgagtattgcagttgcaccttcattataatcatgtattagttgaggcataattctcctatacttatgaatattttcactttcaagatatttaaaatcctcttcttctttttctttaagatagtttaagaataatctaatattctcaattcttttatcccatttctctttaaatcctttatgcctttccatgtaaaatttataattactaaatattttttcaaataaaatttcatcttgtatctttgtatcatatagtatcatttctaggtactgatgattacaaagtaaagactcgagatgatattgtgcagatggagctaatcttacaaaactaatattctctaaatagttttcttcccccatttttcttgctcctatatcactttcaataatgtgccgttcaagcatcggtgccaatatacgtcttaaattagttagctcattacaataaacagttaatttatttaagatggtttcaagcggaacaaaaccttctgaaacacctattttaaaagactcatttttatattcatttaatatatctaatactcttaaattgataaaatgactaccaaatccgtcataagtatagttttcaaataaattaattagtttagaagttttagaattataattttctgcagttgaaattcccacacttttaactagtttatcaaacgggactactttggactgttgtgtgtcttcatatttataagttagtacttgaaaaagattactatgtcctgaagtaacaatatcaccaaatatttcaagggcatatctaatattaccactagaaagatattttaataaatcttcagcttcatcagttctgagtgtatccaatagtaaatttaagagatctctatatggaagaataactaccttgccactgttatcaaatgtaacctcttcatccccttttatctctttaacaaattgaattctcttaacaattacttcttttatacttggcggaactatttgataagaagttatgtttccgtaggcattcatagggggttttggtttcattgaccagtacgtttcatctctaagagatagtatggttgttacatttaaatctttactttttgcaaaacaataaaaacttgctttttcttgtatatcactcggttgttgatcaagattatctaaaactaaacaaacttcaaaattagaatttattaagtagtttaacactttttcaatatgggcttttttattctcttgctgcctttctatgtagtcccccactttttccatgagtctatccgagtcactttcaagccgtttccaaactccctttagtttatttgatatatctttcttgtatatttcatataatgtatcatattcatcaatatcgatctggtcagtaattcttagatgtttttctatatctgttaagatttttgtttcgacttcatcgacatcaccgtaccaggtttgaaaatcaatataacaccaaattaatttactatgaaatccccttaataattgagtgtgaaatctttttataaatgtactttttccagctcctaagttaccgaataaaacaaatacatgcccttgttttaaatctttgttttgttgaaactgcataattaaatctctttcaattttaccggaggactcatctgaaatctccagttggtctacctcttcatagggaagaccaagtaatggaatccgacctttaatatactttttaagatcttgtccatatgtatctaaattttgattattgcaataaactttttgcatcaatatgttatcatgtgttatatcgcgaaaataggtagtaaggataggtgttaaaggagcagatagtggattataacccattctatcctttctgtatgtttcacttgaaattgatttactaaacagggccttttgccttacgatttttccggattctaagatgttttgaaaaaatgaatagcctttattataaggagaaagcatttcatacagcttgtggaaattcctattgattgcgtttctcccagccaaagctattgtatcaacacttccatcatgaggagaatatgttttggtgaatataatattctctccattacttacgacacaaaatggacagtctttttcctttccatagtttcttgcctgctctattgcatcataaagagataccttggttttttttagatttttcgaggttaaaatttgaattttcgaactctcattaagacaaaagtccactttattacttttagcttctataacaaattgattattatatgttttacaaaaataatctataaacccagcagaaacttttggttcccttacaatatttaattcatcccaaaacaaaactttagtaagaagtggatcaataaatttacatctcaaatcagtttcagacaagcctatgttttcagaaagatcctccaaagactcctcaagtttgttccaagcatctaaagacctattaatcacctaattttcctccaaaataaaaaaagattaagacttattatcttaatcttaatgaataatcccaattttggcaagaatatctaatgcgaattgaacttgtttactttgatactttggtttttcagctatcaacttatttattacaaaattcacccctaaatatgaatattcttcgtataggaaatgaacagaagccaacaactctatccaatctgcttccgataaacctatttgattatgctctatagcttgttttaagggtgttagttgttttttaacttcatctttaattttaaattgattcatatttatattcgtcggattatttttttcgttatatagaatctgagttaatgcgggggaatatggtccttttttataccatgaaaattcataatctccgcattgtacacctatctgtcctgctagataaacaattttttgagctataacacgatcatctaaactgttaacggagggcggtcgattaacaacaaaatcatgcacaacatgaacagatatatattgagtattcattcaatcccctcccacaatacataattgtattatattatatccaaaacagatgaaaaataaaacaattccacacaaatttttttacaccccatgcagaaaatgtgcgttcccctttttgtaataagtggcaaacgtatcacaaaatacaccaaatgattactgaagaaacaagttttatttacagcttatttcgaaatggagtaatcagtgttataaatgcaacaaaacaggcataaagacacggatctaattattcattttcctttatttaatccctcatatacctttttcttcattcttccatggtaatatcttgttgaaacatttcgaatgaaaggatatggtcatgaaagttttcgaagcaaataccctgctggccgccgccaagcagcgtgcgggtgaatataaagaactgcgcggccagatggttaatctaaaaaaagcgtttcaaggtatggctgacctcggtgaaagcgacttttcaggccggggagctgacaatatcaaagcctttttccaggatcacgccggcgtcacagacagctggcttgatctgatcgatatgaaaatcgcatttctcacaagccttcccggcaaagtcgaagacgcaggtctttccgaatctcatgtagaagaatcttttctggagcacgagctcacccatgccctcagtaaatcaaaggcgattatggaagcccagaagaaagacatgcgctccatcctcggtgagatcgaagacatcatctcgctcgaattgttttcaaccgaaagcacagatcaaaagctttcttcagctgacaaaaaaagaagcgaaaccatacataaactcggcaaacttgatcacgatctaacgaaagaatacgcagaaaccgaagcgaacgaacagtttatccaagctgactttcagcagctccaaaacgccacaggcaaaggaaaaagcgccacgccgcttcactacaacgccaaagcgtaccgtgaaagcgacatccataagaaaaaaggcgatatcgcaagacattcggatgcttatttgacgattaaaaaggaagaagcgaaagagcgtgaaatcaaggatctgaagaaaaagctggctgatggcgtaaccgacccggatgaatacttagaaatcgccaaaaaggttggctatgagaatctcacccctgaacagcttgaatttgtttcatttctggaacagcgtaaagctttcatggataacggaaaagaagcattgcaaatcataggtgatggcgccaaaggtctgcttgttggtgtatacgatcttgccaaggataccggtgaaggagcacttcaactcggacggaatatcggttggacaattgacaacttaaacaaagatcctcaaaaagttctggatactgttctggaatacgactatctaggtgtctttcaaagtatggttgacacattgaaggatgattgggataaaaagatgattcacggcgatgcatatacacggatgcactatgttacttacttgggcggaagccttctgttattgaaaggcggaaagtcctctgtctcaacaggctcgaaagatcttgctaaagttgggaaggcggctagcgaaaagattaaaaatggcaatccatctgtcaagccttatgccaatagatatacccctgcattagaagggattttacaagacgccgggaatactattaatgttaaaaatacgccgcttttaaagagattagttcaatcaaaggatgatttgtttactaaagccgcaccttatacttacagagatgaatacggaaacctcaaaacagttaacttaaaaatgggccatcttaaaaaccaaaaacatcctaaaactggagttccatataataaagacggttttccaattttcaaagcaaaatttgatacgaagattgattctaaactttataaggaaagcgattatttacaatttaaagatgcaaccttaaaattaaaagaagaaattgaaagagatcctttacttagaaatcaattcaatgaccttcaaatcgaaatgataaaagctggtgaaacaccagacggatatacttggcatcatcaccaagattcagggagaatgcaattagttgaccaaaaggtgcatcggcaaacaggccatacaggaggccggcacctttggggtggaggaagtaagaacagataggagttggtcaatatgacagagtggagattcgccgaaaaacctatcggggaaacaactgttaaaaaaatcgaaaaggctttagatattaagtttccaaacgactacatttcaactatattaaacaacaatggagcacgcccaagtaaaaagatttttgactatgaaaatacaaaaagtgcggtttttaatcgattacatggtctaactgaggatagttcaagttttattttagaggttttagaagattatcaggatggaagaatgctttcagggatagtccctttcgcctgtgatcctttcggtaatgaaatctgtttcgattatcgtcagaataaagaaaatccctctgtggttttctgggatcatgaaattgcttatgaagaccctgatggagctttgagtcatatatctgattcatttaccgatttggttaataaactatacgatgaataaaaagataagtcccttctcataacgagaagggattctcttattttagtagagcttcaagcttcgcttttgtttttggtccataaataccgtcagcagacaggccgtacatggactggaatcgtttgaccgcatttgctgttttcgagccatatgcgccgtcgattccaaagttctttgcgctcttatccgggtagtaatgaagagccgccagcgccgtttgaatctgttttacagcctcccctcgggtcaacgggcttgtgactttaaaaatacccgcaggcaggcggaaggatgatttctttccgttggatgaagagccggccgaatccgtcagctttattatctggccgactctgattagattcggattcttaatgccgttcaagctttgcagggttttcatgcttactcctgttttctctgcaattacagaaaggacatcgcctttcttgacggtgtacgtcgccccgctggtctttgaatctgttttttgtggtttggatgcttttttacctccaaggcgttcaagttctgcagcaatggccgctttcacttcatcccagcgccccgaatctaaaatacggtgcgggcagtatttcccattccagtcctgatgctttctgattttgttaacgccccatccgcgctcttgaagtaactgagcgacaaacttgatagccagcgcctctgctgcttggtatcgcgctccgcctgacttgctgtagcagatttctacaccgatagacttacggttcccggttccgtttgtaccgtcgccagaatgccaagcgttccggtccagcggaatcccctgaattacttctttatcatctacagcaaaatgatagcttgtcgattcgctgtttcccgtcatataactgatttcattggcggctgatgcgtcgtttgctgtgttatggatggtgatatactccggcgtcattggattcgggcatttcagtgcgtaattttcacttggaactaatctttttttgactgcaattgtcatgaaaaatctctcctattctgtttttgaattcaaaaaacagcagccggattaaccagctgcctgttcgtctttttcttttgtctgatcgttgtcgctttcaattacgtgaagccggtcagtgatgacggccggaattttaacgccgatctgtgccaaattttccgtgatggacagtccctcatttgcgatataaaaaagaacggttccaaaggtcagaacaccgttcaaatttgttatcgtatcaataatgtttgcgacgatgaccaccataaaactgagcatctttcggacatatccaaaccacgcgctgcgactccggagctgcttcattttccacgctttgataatgccagtaatgacatccaagatactgagtatcaaaagcaagtcaaggtatttcacctccccgaaaagatatgttcttgcgatctgtaagctttcaaaattcatccacacaagtattccctccattttgatcacctccttcgaggcaaaataaaaacacctattcggttacaggtgctggttcactattattttctttcgctgacagtgcagcatttaattgttcttgaagttcctcgcgcttcttttgcgcaaatgtatataaagctttgtactcggcgcgttccttattcttttgatccaattcttcttgcagtgaaatggatttatagatttcaatctgcaactgttcctgaagctgctcttttgtcatttctttcattccgttcccctccctattcttgatccggatacgcattaccgcgctcttttgctgtaatttcatcatattccgcttgagtgatgcggcctttctcaacggcttttctcatttcaatggtcaacacagttccatttttccagcagccctcaaaaaacccgtaaagtgtactctgactttccatagggccccctccgatcattgtgattgatttgccattaagatattacaggctctttgaagatccaaaatttgctctttcagcctttcgacttctgttttttcactatttggatctggtttaggatttacaactgttggttcaagcttcattttctttcttctcctctccgtcttctctacacataaaaattgtgccttccctagtaccatctggcgacaccctcactgatacaggaaatgaaatcaaaaagttttttccttcataagcacaataacttctcccgtcaaggtaagccttacttagagaaagggaagcaatctctttttctttatctaaatctaaccacaggacatattcgaccgtggaagtgtcgtccggtgtcagatcgaaatatgcagcgtcaacaggatacgttttcccttcgacctccgcgtcccgtagttctcctgctgtaatttcaatacctgcttcggtctctttaatttcagcggtataaaaccaacctggattagcaaaaattgttttaatcatatagtttcccccttcttaccttggttctatgaaaacagcaaatctgactctgaactttctgccaagtatagccgttgaactcccagtacctcttaaccagacccggaacgctgatgtagatgactggctattaacatgagcgtgaacgtgatcagcatatgaaccgtatacagttggtagaattaagaatacattctcaatgcttgagataccttgtaaataaacatcagttccaacacctgtataagcatctcctttggacggcatcgttatttctgtctccatcagtcggacaattgcatttgtgtttagtgccccgtgcgtgtccgagatagtcttatcaacttgaatccctaacaatgccacgcccgggtatccgggactatcacccgctctcattgttacagctctttcgccacccggtgtaagatctattccacctgaaccatctaaaacttggatgtttatacctgtttttgctctaagcattaagtcttcttctgcaaacatatattgtttatttccgacgtagtgtgtcgcctttgaaccatttgtattgattgtaaaatagttgtcagtaaggtgagatggaacataacttcccatgtacattgtcgtcgccccaccttttttcatacgtaaccatgcagatgaatccgaatcttttagagcatcccagtcattacagtacatctgaatctcagcatatccactttgatttttattaccagacatactgattgaagcattgcttaggtttaaatatcgtgtaggctcgtctgttcccgtgtctcgaccaccggtaaccattgaaatttgaccactcgttattgtcatttcatcatatcttttccacggctctccagatgtcactgtatagttaaaccgctgataaatcttatttccttcaatatatgaattataggcagatgattcgttcaacggttcaaagcgtccgcccttaatcagagaccccgttatatcaatagcgttaattgtccctgaagtgattttgtccgctgacaaactccctatctttgcattagtgattgctccgtcaatgatatgtgcggtgtcaattatggctgttccaagatgtgcctttttaattgcagcattcgcaatagcagcagatccaaccgccgcgtctgcaattttcgctgatgttatcgcggctgattgaatattggcggaaccgaccgcaaggtttgcaagatagttattcgtgataaccccatcaaccaaggctacgtcatagggactgtagccatattctttaattaccgatccttttctgacttgaacttttcttacgatataactgcaattactgttatcatgtgaaccacgaccgcccaaaccaattgtgtaattattaccggtttccggtgccgtgaattgtatattcactctcgcgaattcatcagccgggtaattgcttatgtccgtgagcccgcttgaatccaaggaaataaaagtgcttcctttttttagatgattccaagatatatctgttgtattatttcgtttcacttcaaaagacagggtatatacttgatcttttataagcgacatcgtctgtttcacagaaagttgacttacaccaaaagccttggtcccatcctgagaaattgtcatttcattgaattcttttttgtctattgtgtactttgagcctgaataggcataccaccagctgctatctatcaatgagcccggcaaaatattggcatcatcaaagtttctggaaagcttatcagcgtcaacggctagctcggccagtttttcttttgtgatcgctccgaaaacaatgtcatcagtcagaatgcgctgagtggtcgcggaaaactgatccgtgaattcgcttgctgtgcctcgtgtgttgattgagcgcaaacgataataccaaacttcatttactcccgtaaaatgctcatatccgcttgttttgcctctgaaaatacgattctcttttaatggggtgaatccatttacctgtgaagcatatacctcataagccgcaataaaactggacggatcataatcccatgttagggccacattctgaaacattggcttgatcactacattcgacggaacaggcggagctttgtcagggaaacttccatccgtaacctcaccagcgtccggtttactttcccaagtgccgcgatttttttcaattacgctttcaatttgatcaattcgggcgtctttttgtaatgctgataaaaattggccgatctcaacaacgcaagtgttttcagggtcggtaatatcgtattccattgaaataacgcgctgcgatgtctcgattgggatagcaaagtttcgatcaattgcgatcgttgtatctcccaattccacatgttcgtgttcgtgtcccggcacgctctcgagcagttgcacggacagctcataattgatttctgtcttgcattcagtcgtaatcaaatgattatatgtggcctttaagagctcttccggatctgttatgtcttcattattgaactggccttcccgatggatcagcttaccatctttaagacgccccaatcgttctaataaatccggatcgccaacccattcctggcctaaaggcttatcgaccgggtcgccttttgattttttccattctacttcagaaaaatcaataaaacgggaataaccgcccgtttcctccccttcatcatctgtagatgctatggatgccccgtaaccccaaagggctgtcaccgggtaactgataacggttcgccggatatttgttgtatccttatcactctcaaagcgctttccgctgtctttaccgcgacggggaagtatttttatgattcgtttgacgaccttgttcccgtcaaattctatagtatcctgaagctccccgccccatatattgatcacgtcagcgatacaatccagagctgtttttttatagaaggtagtcgtattcactccaagttccgcagttacttccgccacccatcttgaccgagaaagaacgttgtccagtacaaactgagcagttttatcggtagggcggaaatcttttacaaaggtttcggcaagctccatcatggcagcctcacaggtaacctgggtgttaacctctccttcttcacttgtatcatccagttccttgatgacaaacagacgcattacaccgtccttatccttgaataccacttgattctcttcaaataggaagcgcgcgtcagggtgggaggcatcggctacaaaagaaaaagaagagcccttgttgagctcttctttgtatttagcatcccagaacgtacaggtttctcgtccgtggctggacagcactgtcaataatttatcatctggtgaaagtatataaatgtcagccatgaccggacctccttacaaatatgcctcattaaacttgatgctgctcttatgactgaacttgattttaactggcgtcttgggcggcagcagtaaccaatctgattgaatttgaagtgctgtcatgattaaattaccgctgcaagtgacctttctttttgctgaatcaattacaagagtgtcaccagcgatgaaatcgtacagcagcttgatcgttttcgatacagacccatcagcattaagaagagccacctcatatgaagtggctttctcttcaaaaacgcattcgattgttgggtctacggctgcatagcccggattagtaatagtttgaacacctgaatcaaattcaaaatccttcgccgggccgtatttttttggatcaggacagataaaagtcaatgttgcagtctgaaagcctccctgttcttcgccttctgaaatgctttcaaagacagcattatagactctgtcaggctcatcgtgaaaaattaacggtttaggctcttcagtatgcagaataaaagtcagttcctcctgcttttttttcagctcttcttcactacggaaggcaaaaagaacctcaacggttatgactcttacaggaattcttgtgtcccgcaggaaacctcccggacgattccctatagtggctgtattcacttccctccctgtcacgcctcggccgcccgtggactttacataaaagaagggtgatatatcaatgccgtcaaacgtgattttccattggtttggcagcagctcctgataattaatcattaaatctcaccctccttgcgtttgaccttttctgtgcgtctgtgacaggcttttctactccttgaccgaccttcttgctgtccatctcaacaacaatcatcctgtcaggcaattcaaggttccggatgtccgcgctcaattcttttctaaccgtgccgagttcgctgctagaaatggatgtgtcatatgcaaaattcatatcctcttgctgaatagtcatggcatcactgacggctcccatagctttctgaacagtgccgatgccattctgaatccccacagcgataccggcaggaaccatgatccccacctgatcccgcatcaatctggatggggagtggattttcaattttttcttaatggttttctcaattgtcgatgcgatggagtttgcttctttcgccagctcgcccttcatattcttcattccagaaataatgccggccattgtatttgatccgatggctttgccgcttttcttgagagaaccaagttgttttacatcgactgtaagctccccaattttgcggagatagtcatttttcagaagtgccagttctttatttgcggccgagcgtaattcaactattttcttagttgtctcgtttttcagtccggttaattcttgttccgcctgagtgctcgccagcttatgcttttcctgccacagcttgacatactcatttaactcggaatctgtcatgcgtgaaatcgcattaatttgatcagctgacccgacacccatttctttcaattcgtctgtgaacgccttcggtgcccgacctgctatttttgaaatgtcattgttgaacgttttgatcttgtccagctgctttttaagatttgcagtcagcttggagccgttcactttttcacttgagacatcgtcaaatagaccgatggcgttataaatcgcgtctgttcggtcttgcagttcctttttataggcatcgttggccgccttaatatcggcagtcagtttatcattcacacttttgaattttgagagataagtattgtttgcagaaagaatgcccttgttaagtttgtcagccgctttcttttcggcttccttctgctttctagccttatcagccatcgttttttgagtctgatagatttcccgttgaacctttatttgctggtcagaattcagcttgttcttcttcttgattttctcaagcgttttgatataggtattccctctgatttttcctgtatcgtattttgcctcagctttcttaatctgatctgatactttcttggtataagccagtttcgccttcgcttccttgcgctgctgctctttcagtagcttcttctgtttatcagaggcgcttttggatgcctgatatatctcgcgctggatttttcggttttgctcgttagtaagcttgttttgcttctgaatcttttgcaatgttttgatataggtatcggcgcccattttcttggtgtcatacttcacttcagcgttcttaattttgttggatacctttacctcagccgccttctgagccgattttgctgcttttgccgcggccgcttttactttggcctgcgatttatcaataccagccgccataccggtgccgacgtgataaccgacctggtcacgcattacccttgacggagaatggattcccagaagttttttcatgccgttaggaatagcatttgccattgatttcactttgctcgctaaagcccctgccatgccgctgataccatttattaatccttgtatgatgttgcggccaatggacttgaggttgatgcctctaaaaaatttcatgacaccattccaaatgctgacgatacgttcttttgttgcttggatacggtttacgatttgagctttcatgtagctgaatgctgtagaagctgcgcttttaatgccgttccaaatggacatcactttgcttttcactgtattccagaggcttattactctgtctctcgtcgttacaattctattgacgatttgcgcccgcatgtagttgaaggctgttacagctgcactttttaaagcattccagacagatgtcactttgctttttatcgcgttccacaaactgaccatcttgtctctggttgcaataatccgattcacaatttgtgcgcgcatataggtaaaagcagtcactgcagcacttttcagagcattccatatggacgagactttattcttaattgcattccagatgctgatcattttatctctcgtcgcaatgatcctgttaacgatctgggcccgcatatacgtaaagactgtgacagccgtcgatttaagacctgtccaaattgaggtaatagtcttcttaatgccattccatactgaagttgcagtcttcttaataccattccagacattagagaagaacgactttattccgttccatgttgatgttgctatcgtctttatacctgtccagacagtagacaaccaactggaaatagcaccccataccgcaattgtagccgatttcaccgtctcccaattcgcgatgatcaaggcaaccagaccgatgacagccgccgtaatccatccgataggccccattgcgatgacccatgatgccgccatacgtgccgcctgtgctgccgcttgtgccgcaagcacgacgagttgtcggccgaataaaaccatttgcttaccgcctgcaaccaacaaagatataaaattgctgatctgcgccgccgtccaagccgctgccattcgagtagcttgcgctatggattgcgctgcgagcacggtcattttggcaatgaaaagacccatctgcttaatcccgtttgtcagcattgtgataaaagaggtgatcttcattgctgtccatgcggttgctgtacgggcagcacttgcgattgattgagcagccattacggtcatattcttgatccataaccccatttgaacaatgccgcgcttcagagcagaaacaaacgctgaaattttcatggctgtccacgatgctgccattttcacagcattagctgttgctcttgctgccatcgctgtatacttcgcaatgaattgtcccatagttgctattgctgattttaattggccaatcaggccggccagtttgacacccgcagctgtggttttgaaggttcgtagataatcagctgcatctttaaaatctttaagaccgttggtaacagcgcttaccgctactatcgccggaacaatagctcttaaagctccaagtaatgagataccgactgcgataaatttcccgattgccgggtttgcctccatcgccgcattagtaaatttcaaaaacccgtttacattctccaaaatcgttttaccgagtggagccatgccaacaagcaagttgatgatagtcttcgcgatctgccccaatgtgctccatactgtagggccgttggtttttatatagtcaatgaacgattgaaattcttttgtttttgtaacgctgccagcccactcattgaaccgcttggtcagatctacgagtgatgtcatcatgtcttgagacataggagcgaatccagtaaacagctttgtcaggccgcccgaaaagtttctgatgatctgcaacagttttgggccgttggtttttgtatactccacgaaagcctgaaatttctttgaagaacctaagttcgctgaccatttcacccatgattgggttataccttcgatagattttgtcatgctctttccggccggcccgaatgctacgatcagattgaaaactgtccgtaagacgttcccggctgatcggccgaacgaagcaaacgcccccggagcttctttgttcaggtatgaaatgaacctttgcatgtccggagctttaaaagctttgtccatacttttcgccagtcccacaccctcttttgccagcccgtcaaacattggaatcagtgagttaagcgcaagtttgaacgtatttagagacataccgaaggtttttaagatcggcttttgaaccatcgtaccgatgtcccgccaattgtctttaaagtcttcgagggtctttaaagcctctctctcttcttttccgagagatttttgcagattattgatctgtttcatgattttagcgcgctcttttgcgcttgttgcattgtccagcttctcctgcagctttgaaaggtcttcggatgctttaaatacaccgcttattgaagtaatggcaagggcgccgaatgccgccgcgcctgttcccgctgttgcaaatgcactggttaaccccattactccgccggctgccaccccgagcatagggcccaatgagccgattgctccgacaatacttgcaagggctggcgagattgcagggagtagggacgttagtgtcccggcaattgaatgaccgatgactgttgaaactgagtttgtgatcttggcaagcctgttcattgacgtttcaaaccgatcaattcgagcctctatactgatccatactcttctcggtaaggacgccagagcagcgcgagccgttgccacagagcgcataagcgcagccgtgtttccgtttatgaccgtggtaattctgtttggcaatgaagccaaagctgaacggacagccgaaaccccgcgcatgataggcgacgtggccgcattaaaagtggtagttacgttatgagatactgatgctattgctgaccgcgcaacagcgacagcacgccctaaaggagtgggatttccgtctatcgtcgttgtgattctgttcgccaccgccgatagccctgctttagcgcgtgccaatgcggaagataacggccgcacattccccattaattgcgtggtgacagtttggggaatctgtctcaatctttgcttcgcccaattgatggcccgtgttaaagggtctgaatctgcatctaaatcaacccgcgtgcgttcatgtcgatgaacaaagttatctatttgttgcgccgcctgccgtacccttgcctgaaagctggcaatctcagcatcaacctcgactgtgtgatgatctgccatccggcgcattatatcgttgacacgatccatactgcgattaaattttcgtgtctgtgcttcaactattgctgtcagtctttcgatcattccctcaccccattccttgtccggattttgcaaagtggttgcggattgcatcattaaaccgctgaacccctttggctcgcttgccgagctcgtttacatctgtcttacgccatttgtcgttatcgccagtgatattgcgctccaattggcgtctggccttcttcgcatcaaacattttcgtttctttgggacgcttctcattcatggcgtaacggtgaaacatggcgtttcttgccataagctccaattcatctatttctcgcaacttggcccctttgagcagaagcttgtactcgttaggagtccatgacatgattaaatccacatcataaaccccgagccaatgtgcagaattcgtaattatttggtcatagtcgatcccgttctctctttgtatgcctctttcatcatcttcaagacttccttgccgttctcttcgtcctccagccgcttcgcttccatttccggcgtttcgttcggagccggtttcttccctttgttcatcttctccatcatcttccagcgctgacggatcacgcctttgaaaaaacccgccgagtccagcgttgtgaatgcttcattgatcatcttgtcaattgcgtcgcctgtttcgtcttcatcaatgattttaataattgcttcttcaatagcctcaattgatggcttttctttcttcaagtaagcgagtgcacaatcccaaaaagcagaaagataggaagcctcttcgttgagcaagctcatgtaaatattcattgtgccgcctttgcccttttcgtccgcagtggaatatttttcgtttgccaatctgtcaaaagcaaagtcgcagcgtgatttgtattctttatctccgatagttaagtaagccatttataaaacctccgattatttttttatgttaaaaaagagcccgggaagtccggaccctatgattccttttctgttcgtatcgtaaaattggccgatcgttttgatttcccggccgagttcactgccgacacattaaaaatgtaggccgtgtccggcttgagattaggattcgatgtatacgaattctctgagacagtcgctatttttgcataaaatctgtaaatgttgtaagatgacgcccctttcaccgcatcccatgaaaaactcacctgatttgaagtggcggttttcgcagttatattgcggggtacgttagggcgtaaccgcttgtgtttgcgtaacaatctcagtcattgaggactcgccagcatcgttcacagcagagacgttgaccgtcagtttcgtgtcggctgcaattcctgtcaaggtgtgggatgtgccagtgacagttgcgtccagttgcttgcccgctcccctgtataccttatatgaagtcgccccatctaccgcatcccatttcacggtcacgctgtcagtcgtagccgtgaacgatagattttggggcgcattagggcgtagtcgtgccgccgaattcctcaaatttagtcgcgccggcagaggattcaatcgccgctaatacttcgtccgatagtggaggcaattcgcctttgaatgtttttccgagtacaggaagagtaacggacgtctcaacaaaaccatcttgcggctggctcgcttccaaactttcaataattgcatgaccataaactgcgttgtgctttccatttttatttttgtttttattgactttccagaccttaattgccttttcgttatcaaatgcgttttcgatcgcttcctgccctggatcggacacagcagcataaaaagtcagctcaaagctttcattttttgtaccgtaaccgacaatacggcctgattttgtggactcgtccagcgtgtcctgttctttcgtgtgtgacccttctgtttgaaaggcaatgaacagcccatctgtcccttttgcatccatcggctgcacaaaataaatctcatctttaccgtttaataaatccggcattttgttcatcctctcaattgtttattgtgaagcgcattctgagaatgccgtgacgcgtgtacccgtcaatatcggtgatcacctgcatgctgcgcatctcagaacggcataaagaaaagccctctattgttaggggcctgcttgttaacgcttgaagcatgaggctcagaatctccattgcttctttttttccgttgtaacccgaccagcagtgcagaacgacattgatttcttcaccgctggatgtctttgtttcaaatggggaaacatcatcatctcccattgtgacataaggcttttgctgatctttcgggactgcatcaaagacgcccgtgacgcgcccgttcagctcttcgtctgttgacaacctcttaaatagagcagcctgcaacggccacaaggcagatcgcatgatgacagctcctttctatcacatttgactggcaaaataccgcatgccttcgtccaccgctggattccagaacggctgcgcccgcattcctcgggtgaccacccatctattaagcttggtgtcataataaacccacggcgtttgccggccgccgccttcctctgcgtaaatccccgttccgtattccacatatacggcataatcggcaccaacagaaataacggcccgtaagccgccctcttggtagtcgatttcaattgaatttttcaggtttcccccgtctatcgcggcggtcggagcattcagaacagcatggctgtaaatcagctcggccgtgtctgtgaccagttgcttaatatcatctatgacccggtttctgaactcgctcgtggctctttgcatctgcctgacccatctaccactgacctcagccattgcccttcagcacccccgtaatctgacatttcaaattcataatctcatgcatgccgccctggtcgatcggttctgatttgagagtcagcaccttgttttcgtagatgatccgcattgtcttctcaatatcagtgcgatacgggaaatacacattgcaatcaaccgggttctgaagttgctgagcctgataatattcccgggacgtaatcccgccgacaaatgcctctgttgtgagataatcagtgaatttttcaacatagcccccgccgccgtccggcaccttttccacccgctgaaacgtgacaacatgcggaaattcttcatagatcatatgactctcagctttctgtatggagcaagaagcttcgtaatgctgcttggcagatctgtttcataagaatatgagacatctcccatacttcggccggaaagattggacggagtcatgttatgctcgatcgctttcgcgacatacagctttacccctgctggtaatttttcatctccattgaccgtgaatgagttgttgcaccagtctttcgcttgatctatgaacagaggtaggacctcggccagataggtatcgtggctgtctgtttttatgccaagcatattttttacggtttgaacatccatagaatcacctacacttcaccgagaacaattttgatcagttcctctttaggcgctttgggatcaaattcatattcgttctccttcagaaagacaacgatttcatccttattcacctttttcaattgctcttcagtcatatcaagaaggtttgtacccggccgttcgttcgactcctcagattgtttggcctcttccactctcttaaaaccaatgtgagaataaactacctcaaaagccttttcagtgcattcaatggttttggaaccgttagatgctttcatatcacgcgccgcctccttccagtgcttttatccgattctctaaatcagatagtttggctgtcacatcgtcaccgagtttagctaaagtaactgccttatctcccacattttttgtttgaacgctcccggtgccgatattacgattttggacagacccatcaccgatattgatgtttttcacttctccgtcgccgatcatttccgaattgatagttttaggagcaggcgttgaaccgggcaaaccggtcaccttcgcaccctcttttatttcgagctcgccgccgatcaccaatttgtcgccgttattagttttatagtttttagatgtgtaccccataagcttacgcctccgttgctggtgtaatggccgcaaacgcatcgtcagtcaatgtcatgaatccaacttgctgagttacacggagagcaaccatatctctctcatacaagttgatcgggtttccgtctgcatcgacaatggttgtcaatgttgcatcctctgagattttgtattccatgccttgagggattccgtaacgtgtgtaattccagtcagctgcaagtaatgccgctttttcgtaatcccatgacttagaatccgcatatccaatcggaaggccaagagcctgctgtgtggcgccgcctgtcgcatcgttgaagatcggaagaccattaccatcctttgtgccgcggagcttttgacggaatcggcgtgttgttgtaaagccgtttacatctttgtcagcgtcttcaacaagagccatgaccccatttaactcatcatatagattgccaagtgagtttaacgcaattgtgttaccagattccttgattttttcaaatacagatacgccttttccaaacggtgaatctacgccgaataacgcagcctgatcaaatttgatcgcaaaggcttcagcgatagcagggcgcatttgtgtgaagaaatctgttacagagtagcgcaagaattctttagaaacagggatgatgacacccaatttctttgaaatcatttttgctgttaaccattgagccttagaagtttggattctctcgccttctccaacccagtaagctcccggtccagaagccaagtacgtgaattccttctccggcttactcatttcttcatattttgctagttttgtgacagcagattgggtcataaactcttttaaaaccagcgttccttgttcagttggaaccttcccatttactgagtcttgcattaatgcattgtttggatcgaatgtcggcatattaatagccctccttattttctaatacttgcttcagctgcaagcgagctgatgtctaaatcttgatttgtcggttcgttgctaccggactggacatcacggccattctcttgaaacttggattcaatagccttttgaagtgcagcgttgtacttctcttcgaatgctccgaggttcttcatcgttgattcttcatcctcaccgacaaagaatcccactacatctacatctgccggcagttgcttttcggaagcataagaaacagctttgtttaaaagcttttcacgttgtgctgctgtcttttgatctttcagctccttttccagcttcctgatccgcttctgctcttctgtttcttccggataaagctcttttacctttgcatcaaccagagcatcgagattgttcgccttccacgtatcaagcccttttgtaaaatgagaatccaaccgaggctgaatgagacgttttccttcttctgtatctaaaaacccattcaccttgtcagcagacacggcagaaagttcattcagatacgactgtacttcttcgttctctttattttcttcaagaaattttttcacatcttctaatgttggcattacgcttcttcctcctttgccctctacagtgcgcgcctgttatgagtgcatgaaaaataagccttttaacgtcatgctcaggacaaaataaaaagccgctgtttaacgtcttcccttttcctcaatggatttgtaccactcttcataggtttggtatgggattgtttggcctgccccgctgccgccttccctcgcccttctcgtatccggcaggacgccgtttactttgaaagcaattgtacaacggcagttaatatcatctttggcattattcatgtaccccggagccgggccgacgccgccgtaaattgatttgaacagcccattgcgttctattgtcttcccgtccagcttcctgtgaccggctcgtgttttaagatccagggtagcattccacatctttttaagattgctccgttttgaggccttctcagcgctttccatccttgccgagacttgtgccctatgagcttctgttctcgccacgtcacgggctttcctgcgagcaaattcggtcgctctttcaatgcggtgggcgatctttgaataatcctcccccgcttgtaggccctgcgagacggaaatttgaatctgccggacataatcgtctcgatgccgcctgtatatcgctgacaaagtcaattcggctatagggtttagaacggcctgccgaatgacttcggctgtcggaatgctaaaacccaagttaaccacggattccatttcaaatagataagcagaacgcatataattctctaaaaactgcttggctgctaatgcctcaacaatagtcagaatggttttgaaagccttgtgcgattcctcggccatcctctccatttccttgttcagacgattgtatttgttggcatcggctaaagtaagctggccgtccttactgtatttcgcatacagccgggcaatttgtgcattgatctcctttaagcgagatgcaaaaacgacatcaatcttttgagcatcctcagtgatcatgtcgtccaggtacttatcaatatcattctggttcatcttcatcaccgcccgcgtctgtttccacatccgttaacggcggcatgttgagcctgtattcctcttcttcctcttccatcttcttcagctcatactggacatcatcaacaaacgacagcagagacagacgggtttcttcgcttaccattcctttaagctgtccggtcgtttgtgcttcctccagtacatttgccggaaggttccgcttaaagccaaaccaaacttttttataatcttccgctgccgctttccttttagtgccccatgcggaaaagatcaatttgtattgataacgcagagcagcagtcatcttccgttccattgtgatgcatttgttttcaagcgacatcaatttatatttcatcgcaacccctgatacattcccaccaaaagattcatcggagaaattgaccgatttcgcaaagcgaaggatattctcttccaacctatcaagatggttttctatgatggcatcgtttatatcctttgtcagatagcttacgtcgtctttttcgtcatacaattcaaggattccggtctttttgagctgatcaagcgtctcttcatccgcgccaagcccttttaaaatcagataagccagtcgatattgctcaatctcattcgatgcatcggacaacgtgcggtcatacgcatcaattaacgaaagaaccctttcggcatctccctttagttccttgttattcgctaaaccgaataaggggcagccgtcaaaaagatgcaaagtttttttatcaagagtgaaggccgagctttctttcgtactgaaataataaacatatttctgatcatagaattctgctttgatctttccgccatacaccatgtaatatcgcaaagcgtaagcaggttcatggatgcttccatcagtaataaaggcgcattcccatggatcaatattttttatacgctcgtttccagaacgatcaacgtaagcgaggcgggcgccgtaaccgcaaatagaggccattttcccccactcgctgtcttcatcagcaatgttgttttccgtattgaaaccttcaatcagctgtttcacaagttttgcattacttgcttcaccgctctcatcaaactcatatgcaataggatgaccaaacagatagcccacctttgtatcaatgatttcagaatcaaacgagttgttcagcctattgtttactttgtgatcaatacgttttaatttccctgtttcaaaatcctcgtattcaatggcttctctggataagatcggaacgccctgaacctcagcctggtaccgatcataaagctttttcattctgtcatgatccggcttatgttcctgaatgatcttatcaatcaattcaggcgttatgccggactgttcaatcatgtctataaaatgattcatcagctcacccctctccgtcttttcggtttattatgcgaatacagagcgtaccggagtgagtccagcacgtcgtcccattccttcacaggatcgccagtcttttgattccaaacatacataaaaatttccttttcgaagcgagcgaccttatctttcacgatgaacaattcatttcgcttaaacagccgcgccacttcttcgataccggatatgaccgccttatcagcgttcaatgcacgcagtttctccctgcggaatcgctgaacgtgttccggccgcgcagtatcgcagtagaaattgatgttgccgtatcgctctttgatgcccttcgctatcttcacccagtaatcaatttcctcatgttgctttgcatgttcttcgagcaaataaaaacacccctggtcatcttgtccgattacaacaatagaacccgggtgctcatatccccagtcgacgcccgcaaaatacttcttgaaattgacacgcctattttccaattcctcagagctgatatagtgaatgtccttattgaaatccttgtatatgactccttcaggcgccacccaataaccgtgtatgtcccgatctgtaaacatgccgctcggcgttgatgccacgatgctctccacatattccggatcgagaaaattgttatcgaacagcgagaaatgaaatgaccggatgttcagccgtccgcttttcaacatttgcccgtctttgtcgatataatccgttttgacggtgtgcatcgggttctcagggtttgtatccatcatgaccacagcgcctttgtaggagcaccgggaaatgacttctttcacgaaagagtcatgcagggcagtcgcttcattaaggaatgcgccggctgacgtgaacccccgcgcttttttccatgaatcagcattggccccgtcaaagcaatatacacggttgccgaatatctcaacggcattcgacttgtcgagcctcaattctttacccagaatcaattccatatcgttcaagacatttcgttttatggctgcctgagtagccccgccgatgatgaaggataaacccatattctgatacttactgacgtgagcaaggaacgtcaaaaggagcacgaatgttttccctgccctctttgcaccgctacaaatcagaattttgggttgctctttaataaagctgtcccaaacttccttttgctttttattcagttccatcggcattcaccattttcctaaacattgcggcaatatcattttcttgggtgtttccgtcgccgccgttaacagccttcttcgtcttctcgatattcaagcgcatttgctccaatttaaggcgccgctcatcttgctcatgcgccagctggtcaaattgcttgatcaagctccggagctcgcccattgcccgagattgagcgttcaggaatgttgcatgacgatcccaagcgaattgaaactcccattctcgctcatcgccaaacatacctggcttctcttttttcaaaactttggttacatcatcttgatcctgcacaaacataatgcgttgcgcccgtagaatggccgcgtattgaatctgaatctggtcccatatcatatcagcaggggaacgctcctgaatctcttccatgatttcaagcgtttccgcgggcagatactttgagaaaaacccatgcgaaaccgcgtttcgatttctctccggggcgccgccgttgtttcccaatgcatttttattaccgggtggggcgcctgccttttttgtgtgcacacttttttcagagggtgcacccttttttcgttcccaaccatgccgctgcttccacgatttaatggtgttcattgacaccccgtatttttcggcaaggtccttgtatttcatgcctttggcgtaatccttatacgcctgaatgtgcttttcagccatctacatccaccgccgcctccttttgaattgagttgttttggaaaaggatattctctctaaaccgacgccgcactcagacckttaaccgccaatagtttttctgagatttaccggaatcggtttacagagaacataaaaagcaccctttatagggtgctatgctttattgatttagaagccattttatacgttcaactgaagcaatgtagtgtagtattattagacaaaaaaagataatactaactgtttttaaatcactaaagtaaatcgccgcaacagctattgcgaagatcagtaattcaataatcaatcttataactccatttacggctattacagtttgaccacttcggcttggatcgttaggtactgcaaatacagtccaaattagcattgctactatcggcaatactaaagttaaaacatatcttaaaaaaccattgaaatgactccaagcaaacacccctatgcagattaatgcagcaatttcaagggcgaatcttaaaagtaaattagtttggttcagtttttccaactcctctgtattaaaaagcaccccgcaggatgctcttttcgagaactattttacgcttccattcttggcttctttttttactttttcccattcatactttaaatactttctgcacttattaactaaactatctgttaaattcattagttcgtctcgacctgcatatccatattgtttacgataggtgtcacctataacagccctcgactcgctatatatttcctcgaaaaaattttggaatgaatagtcatcgcttttaattttttttgcaaattctttctctttctcttttaatacagcttccatcgctttttctagctcttcctttggaacagtatctttcttttctatgatttttttcgctttatataaaccaattattttctgatttattttatctataagttcattaatttcctgatctttactgtcagtatagtttaattgtaacttaatattattctgtagataaaataacctttcaaaatattttgcttgctcttcaccagaaagaaatggtttatcatcataataagtagccaatgaaagatactctgagatgagttcttttaaattagtcatccacttaactctttcagtagtcactgcattaacaaatctcgactttttattagttctgatactaataataagagtcgtaataccgattactaatgtaaccaatattgacaccaatgttatccaatccttaggctccatgtttattttcacacctcccaccttattatcggttaaggagtgtgataaaggaactatttgcaaaatttgtcgaacgaaagcgcccttcataaataggtggcaaccgtaagacaaaaaaacacccttttgacagggtgcaatcaacgtttctttttatagctttcaatatcttttctcaagaataggcgatctctgttcgtagttttaatcggaaccaatgttttataatccaccagctgcttgaggttctgccggctgcatcctattatctcaatggcttcagatgtcgttatgacctctttatccataaaatctctcagctcgtctatactctcaaaaataaacttagccatttcggaggtttctccattttagggttatattaattatagtcaataccaaccagatcattgccaaattcatagtaataatatcgagagtgctgagatgaccataattaaaattagtgaacaatatcacaaacagaataaagaataagatcgttgaaccatcgattaattttttcatatttgctcatttccttctatgtttttgaaaatccaaaatatcctcttttagaaaaagcctgtcccgaggcatttctttcatcggctctaattccccgcttttaactaactggtttaggtattgacgagtgaagcccaatatttcaattgcttcgcttgtattaacggtttcctcatttaagaaccgtttaattgcatcgcgttctttaagattgtacataatatcatcctctttgaattccctaatttgtaacaataaacaataccattatacctataacagtagtagttcttaaagattttttgaaaacttttcttatgtttcaataaataaacaacctattcacgctaaacagaataggctgtgatctgctctatttttcattttgagacgggaacgttcgatattcttctgcacggttccttttttaatccccaataactgcgctatctcttcgaatgacatgttttgtacagcatgcatcatgaaaatgtctttttctctttcggtaagcacggatagggcatcagcgattctttccttatcccaatcacttacttctccctcagcttcttgaacgattgcgtattcttccggcagcgcatcaattaagcgaggttcagcaagaatcgtcctttgatatgcgtctcttctgtcagcacctcggcgtgcgcccggctgtcttccgttctgcagccattcaagagtgaattcaatgtcactgatcatgctactgataatctttttgtcgttgacctgttcagccgtcagattgacttcagccgtatctttgtagagccggtacatttttcttgtttctcttaaagctcgtttgtattcaatgattaaatcttgcatcctgattcctccccttatctgcgcttaaatgcgccgcccttgcctcgtttaagtgtttgcatgtttgtgttcatcatttgttgccagaaacgatctgagcgcccctgcgtgtttttattgggctttttctttttctgcttcatgtcatccctccgctcaaataaaaaacggacaccaatcagagcacagtaattctgtgcaatgatcagtgtccgcaggctttccgtcttggacttatttaatttggaactttttttgatggcgaatgatttttctctgatatatttgaaatatttaatttcccaggatcaattcccatcaaataaaaggctaattgagcctgtactaatgaacgcaatttttcatcttgaattttatcagctaaggctatggatttattacgattagagttttccattagattgtcgtggtattctttaacccgtatacgtaatttttgtgactccttcaagaacataagtgaaatcccctcaaaaattaaacttcctatgacgctaattgcactattgatagtgttatcagagccaatagaaaaaataataatacctattaaaaggataaaacccactattgacattgttagaccagcatagaactgcaaattcgaatgagtagttgcttgttgttcatatatatccaatgccttttcatcagattttacttcatgttcttctttcactacatttttttgttttttcggctctgcatagcctagtttagaatctttaacgactgttgaattgcttagtaaatcttttttgtcgttcttagctttttcaatttctctcaaatacttcaattgctgtatatatctttcttcacgtttgttctttattgatgtcacatatgaaagtaaaactgcagtaattgtgataaatacagtcataacagaaagaagcaatactgatgaattttcaccgaatacagataaaacatccttcaaaccattttcctcccgaaaccgattatttacagtaaatcctattttatcatatcggttatattaggatttaaatcaagtgaggaatgaagaatttatatcagctttaattatgatcgcctatctctttttctctctatacttatcaatatcttgaaaaaacgccgcggccgtgaatgcaatgattgctcctattaacgtgatgtttgctttcatgtccggcctgtattcgtactggaaataaaaccagaaccctaaccccatcagcataaaaactattctcagcgccatcgaatcccccttatttgatttgaaatttagctgattcaaatgttccgatatagttccgcttgccagaatcagagtaacagtccagctgaatgacataggttcctttcccggtcttattccggatcgttttcacgttgaatgatttcagaggcgttgccgttttgaagctgccccgctgtactaagttcgtatcagtcagcccgccgccgctgcgcttcttgtatacgccggccgtgtaataaagtgtgcttgattcttttctctcggctttccagtctatcgtggaagcgccaaccgtgtatgtcgtggcatccgtaaacacccggccgctgtacccagattcattttgccagcctgaccatgctgcggaagcagacggcgcaacggccaccgttcccgtaagtaatgcagctgataaaatgattgatttgaatagttttttcattattttcccctcctaattcacaaataattaacatttatttacaaggataatcgttattttgctcgaattattactgtgtttcataaaaaaccaaaggagtgtttaaaatgaatttcaaaaagactgctgttactgcactatcgattcctgtattagctttttccattagtggtatggcttccgctaaggagataactcctcaaaaaaatgaaacgcaaacaactatatctcctggtccaattaaagcctattacgatacttttgaagtgagagccgggggttctaaacaattagatgcaaaatatttaggatcagggttcgcttatcattcagacaatagcgctgttttcacagtagacaccaatggacttgtccgtggcaataaagttggaaatgcatatttaactatattcaaaaatggatcagtatatggtcagttacacgtatttgtctattaattttctaatagaagagcattctaatatgctcttctatttttccactttaccacccatgccgcaccccaatgcgggcagtgtgcatctgcgcggatttctaaatcaagtttttataatcgcagtccgggcaatggtattcgatcatggtcggaccaccgaatcaaataagctgagttgagtgatcttatagttgaacagcaataattcttcagctccgcggctttttccggatccgccgacaacctgtttgtatgcggaaaaggtttctgactcccagttcgggtagatctcgagtatcaaaggatcatcgtaataggaaaggactactttccctttgacctgattaagcagccgggccagttcccggtgatcctcttcagtaaagccgccagcataaaaccgctcgcgcccaacatatggtggatccacataaaacagagtatccgggctatcgtacttctcaatgatgttgcgaaaatccttacattcgatcatgacgcccttcatgcggttggcgaaagactcgaaggcagcacaggcgcttatgtatccgccagcagggttctgcccgctttgtgtgctatgcctccagcctgtttgtggcacttcctccgcgttccccttactaatgccggaacgattcatataaaaccacctgacggcccggtcaaaatcatcttgcgggtaatcttcagttttccatttctcatagagcgcccggctgtacggaatggattcgcaagcttgctgcatggccttcggatcctttctgacttgcatcaagaaattcaccacatggccgtcaatgtcgttatacacttcatgacctatttgcggtttattcgctataacatgagccgcgccgccgaaaggctcgacgtacaccttatgggcgggcattttatttatgatgtgatcggcgtatcgacctttgccaccaaaccagattaacggtgagcgtgccatcccttaacccccgatcaaattcggcagcacagagatagcgaagaagaagagccccacgcatgccccgaccagccagatatttgttttatcccgtttagcgataatggtatcgccgatcattttcagatcgtcagaccgagcgacaagcgtcgggatgtagtccgggtgaacctttaaaagctcggccgcctgctcgacagtcattgcttcgtctttcgtggccttcacgttccgttgaagttctacttgtaatggcatcattatgcccccacctcccgcgcttgtggtaagttcactctttgcagaaattcagccgcaaagaatcccgaaaaaccatctaagaaaacaacctttgcgccgctgtgagaagtaaattcatcgctagtacaggaccaaattcttccgtcgtatttgctcgcttcatagcatgtgtgcatgacaactaattcacctttttgaagtggttttctcattccgcatcaccctcccatgcagcaggaaactgaccgtttaaggccttccttaccactccgaaagggtcgtcctcttcatcggtgaatgtagcaagcaaccttctgaaattgtcattctcgtatttaagccgcttaatctcttcttgagcctgccgaaactgaatgaccgtgacatcctgctggcgctggtgttcctcaatgattgcctgctgttttctcatgtagccgatcattatgtctttgacataactctgctcgatgatatagcaaggtcctgcatttatatcgagtggcttcaattcctcttttgaagctaaatgccacaatgacaagtcacttataatttcctgcaatttatccatgcccgttcctcccccgcaggggaaaccccctgctatttgaatttatggccgatctcgtaatcacaacgagccaggccgccttttattgtttgaatgattgttttaccgtgttccggggcgtccattaaatgagcagtcccttcagtgccatctaaaacgatgatgcggactttccccggctcgatgctttgctgaatagttgtttcatgattttttatttctgttggcttgttcactctggccgccccctgtgctatgatagaagtaccagttcatatcaaagctccggggcttcggcttcggtgcttttttcgttttacgacggcaaccgcatcgtcacgccggcagatggctttaattcctcgcggtagatgatcggatgcttttcgacgtaagctgccaattgctccggcgtcattttccactctttaactggaccaggcttgtatggattaattttttcttgcatagcgataacctcccgaattgatttttggcatttctgaacctccaagctttttgcaatccgctcccatccggctggcacatcgtttgtattcggaacagagcgtcatgcaggccatgagcttatcttcttcctgcacccacaacggccgatcgtctgcgattaccacgttttgcagtggtcttccccgcctttcttttgagttttttcagctcgtccagctcaatgaagccgagtgacttatccagagccagcaccttgagtggcgtctcgtaaagccgctcatacagcttgcgtttgatggcaaattccgttgtttccacgcctttgatgtcaatgatctcgatgctgccgtccaagttatgaacctcaaagtctgcaatatattcaatcttccgaaaagttttgccgttctttttgaatgcctcttgaagcaggaaccggggttgcagcttgaaatctttgatctgcttgctcgctttgagccatttcagctgctcatagtatttggcttcggcccggctatcaaacgtgatgccgtccacttgtgtttttctggctccgtacttattcgtttgcatgtgatgcctccaaaagctcaggattttgatagactgttccgagaaattcagaatccggcccgcaatcaccaagagaatcataatgcccgttggtatattctccgtaaaatgcagctaaatcattctcgtaaacaaccttaaatattctccccaaagtgtcttttcgaatgtctccctcccaaatctcctgcctggcctcgcttttgtccttcaatccggtgtattgcaaataaattagatggtgcaacgttttgaaattaggttcgtcttctgtaatgtctgtagcaacaatgccgcttccaccaaactcaaaaacaatgtcatcttcttcgcctaaataaagcattctgtctttgacatcgtcccatgcccgaaacttgatttctctcattcttccgcctccatatctctgactatttccttatcggcccgttcccgcgtgccgtcgttacctaccgtcaatttgttcccagtgctgaatctgcttttccttgtacggcgctgtgaggatgatggctggcagcaggataaccgctttaagcactgtgcatcagctccatttgtttgattttttcctcaagcacccggatcgccggggtaaggtcctggccggccgtttgctcggcaggcccgaacagatacatgccgccggttgctgtgaaatttacctgtttatccatttctcaatcccgccaatctatgatttaacagcattctgtctcccttgatgatcacaacataatccgcacacatttcgtaaatccgggtgccgagcgcctcgtctatctttacgatctgctcgatattcaactcgcttgaaatcaagatcggtttatggttcagatagcgatagttgataacagagtatgtttgctcgacctgccaatcggtagcccgtggcttcccgttcagaggcttgaacagatcatctataaacaggacttcaacctctttcattcgcttgagcttttcttccagcttgtcaaaatcatctttcagatcattgaatccttcgacgtatggaaaatactgaaccgcgatattttttgatttaatcagcttgttagatattgcagtaagcagatgtgttttgcctgcccctggctgaccgagaagggcaatgctgttgttccgagtaccgcgtatgttatcaaactccttgtagtattcgaccgctgtatcgtaagtcactttcaccatttccggcttcccttcggttacaaaattcttgaattgcaacctttcaaattccggggtgatgtcactggaattcattaatttccggatgcggcgccgctcaatgcatccacaccgtacccacacttgataaccgtccttgttttcgagatagccgagttcgtctttgcatacctgacagtcatactcagccttttcttctgaggcggccgacttgtccgccgaaaattgagccgacctttcctgaagttctttcatgactgccgccatcgcctcgtccgtactttgtgttctgttgtttgttggcatactgctgtttctcctttcgtctctggctgaatgggtttgagaggattgcttcaatgtaattcagattaacgttgttgcctttgcttctgaaagcctgtttcattgcctccatgactttctcttcgccgtaatcatccaccatatatccgagccgctgaacctccatcgtgccaatggtgcgggctgttttgttttcgaatagttcaaatgcgtttttcattttttcgtcaacctcctgctgtcctaaaggtattggagccgggtctatcttcttgttgtaatttccaagctgtatgtactcggcataattcaacaccgtcacaatgaaaccacgtttttgcggcagccgatccagcttcaaatactcttgctttaccatccgatctaacgagtatttgatctgatcagaagaccagttgaagcgcctggctaaatctacaagcttaatgattgtctgcccgagctttagttcttgatctgccctgtactccgcccgtttgaataaataatcgtatattgtctcgtctcgtgaatctttaaatggcagccgaggcaggaccacataccccaaaccttgcatatccatgccgctcacctacttcctttcacacagtgctgtcagagccttgaaatctatttctactaatctcagagacggctcatttgtctttaagtagtcagtcgtgtaccgggtatacaagtcctttctcaagtcgcgctgaaccgttttgaccagccagagataacaatgcgggataggaatcctgatcagctccctttccatcagctcaccaactccgaaaaatggatgatgctgttcagttgattagtagcccggcaatacttgcatttttcgcaccgctccggcttctctccgccgtgtttcacttgcaaaatccggtccatccgctgctcaatctcctcaagctctacttccatcctgccttcatcaatattgatgacagctttatcaggtggatcttcttttgaaacccctacgatcaggggctcaagccattcgctccgtccagtcatccgtttttcaatctctgcgtaaagcgccatctgagcgatgtatccgtatgcctcaacaaaagagcaatatcctatttccgggtcccaaactttctcccgcaatgaccgcgctgttttcagatcggagaaacggccgccagctgggttgtatacgtccagctttcctttccatggaacaccaaacaattcagcagttacgatgacttccttttctccttgaagaacaaacatacagagatcatcattttgaatcgcctcaatcatcagatcagctaactgatactgcttgtacagctggcctttttgtgtaaaaagtgatggggtgttttttttaaattcatcaaaagccggttcaccctcaagccaggcatgaacgtattggccgaagaggagcgcctccgatgtgggcggcatccattctccgttcaactttgccatcgtggcagcctcgcattgcaaaaagcttttatattgagaatttgacatgtagtgtctatcaatctcgttagagtaataattctccttgttcagcgccggtatccgcattagcaggatcacccgccttttctttactatcagcaggcttgtcagcttgctctttcagctttttgaattcttcctcagcctttgatttagtcgcgctagtggccttcacattgaagtaatcctctttctttgccatcccatcacgcagggacgtgtaaatacgaccaattttcaagaaatcttgctcagtgaaggcatcaacgttactgccgatgtactcctgaatcatttccttagtgatgccaaattcttttttaaatagggagaaggcgcttctgagccggtcttccagtggttccttatgaccgctaatcaatgttttttgacacatatctaccgccgcatcaacgatgtcgcccggaatcactccaagtatgcaggcgcgaacccggcgagctccttgattggcaaccatttcgtaaatatccctcggatcatcaagtttggtaatggagccccgcgccttccgttcatgctttacagtgaaaattttggtttgcctggtatttgtttcaagatcccaagcgtaagccatgacagatgattcaccggccttttgttccaactccataattccgtaatcaatgttcccccaattctgagccaaggcctccgccagccggatagatggaccggaaacctttgtgccgccgcgaggatattcatacaccgcattctctgccaacagcctccgttcgcatgcttttttaatccggtcaaacgctgcgtatacgtcccgtgggaatttctttgcgatgaccattgccgcctgtacttcttgagcctgtcggcttaccatcgcttctgtagtcacgccagtagcctgctggggcgccggcatgtaatctgagtaatctacctgcgataatccattcattgttctgccacctttctcaaataagcttctgtgacgagccgctgccattctcggtatgcgtccattgacgggaaggaaaataccggtttgcctttactgaacatgaccgagccgccgacttgtctcagacgcttctgatcgtccgctcggtcactgaaagatgctgttattcgttttgccatgtgtaaaacctccattgtcttttatgaggtaatttggtataataaaggaactaatctttaccaaaagaccttttgaagtccactctgccaagtgggctttttttattgtgctgaatgaaacctaaatccaagttgctccttcaaatagcgtttaagattgtcttgtaaaatcacttcgccgctgtcaattacataattatctgctgccgttacttcatcaccaaaaaagtccttttttgtttccggttctgtcgttttatcatgccagttgttcaggaccattggattttcaatattcatcgtgaacacctactcgcaacattcagttgaatcccgcgggctgccatatttaaaacggtttggtgtaagcgtcctttattcgccagccggttaatatcctctgtaagaaccttgatgctccctgcaagactgatagcttcttcgtaatcgccatcccgtaacgcatccgaaagcaagatagagagctcttccgccgactcgatttttctttttgctgaatctgcatccgatttaagaaattgattgattttcataccaacaatgcctgcctttcctctgtttttgccatcgcaacctgattcactagcgctttacgggtccacctttcggccagttccttcatgttcaggccatgactgcgggccagtgaatatatcagcgttttgtttgctgggatcagatcaaaaatctgtttaatatcggccattggcagttcttccgcctgtcggcctggcctatcatttgccagccagcgcgctaaatgctttgttgcctgcaatgcttcttcaagctggtgaatcatgttgattaccgctgtgcttgcactctcgttaagagctgggtctattggagccgccgttgtcgggtgcagccgaaaaaggtaatgtactagatcaatatgttcataggcctcacacgcctcaaaccatctgatgcataattcgggagtaagcttactaaaaccattttcaacatcggaaacgtatcgttgatccttcccgcctatcaaacatccgatctgatattgtgtaaatccagccgctttacgaacaaagcgcatgatcttcggtaaattccgcaagttgtacggattgttctccatatgtttgcctcctgatatattcagctgtatgctgttaaaatttaattagggtcaaaagatgttttattgtattggcttatgatttttcgaatatccggcctcatggctctaaacttcgctttgtggccacaataaaaacaaatattcactctatagagcctctttcatgattgcttgttcttgagcttcgatccatgcatcaatattgtgtttggtaaagaaaatgcgatttcgcacacgaaagtgaggaatttgtttttctcgaaccattgtgtaaattgtgtcatggtgaacacccaggtaatcagctgtttcctgcacagttaatgtattgcgtgtcatactcggcctcctaagcagtgtgttctttactcgtttcgtgtaacttttgatcaaaaaaaagttcatctacatctttattcaacaacttggatatttgatgtgctttttcaagacttggttttgtacgacccatttctatattcgcatacccacttacagatctgtatccgagctttttagccataaaggtttgggtctttccttgagaaattctagtcgcccgtaaattttctaacactatttaactcaccgccttactctttttgtgtaactcattaaactcataataatatacacgttaagggtaagtcaatatatttttattctttttgtgtaagttattatctgttgtgtgtaaaccatgttaaaatttacacaccaaatgaaaaaaggtgtataataatggataatataacagggaaaattctaactgaattaagagaaaaaaaaggttggagcaaatcttttgtcgcaaaaaaattgggcattaaaacaatgtctacatatgcgaattgggagtacggcttaaggaaaccggatggcgagatgcttgtgagaattgcaaagctgtatggtgtaactactgactatctcctaaccggcaaagaacctaatgcttttaatactgacctttttgatgatcctgatttacaactcgcctttagacaagctcgtgatttctcagaagaaagtcaaaaacaagcaattgattttattaagtaccttaaagagaaagaagaacgcgaaggccgcaagcctaaaaagtaacaactgccgaaacctttatttatattatttattatgttatttctgtttactaataagatcgggattggatcgggattagaaccgaactggaacgggaaagcatttttcattagtaggttgaagccagttatatcaagggattcagcaatcgtcctcttctggattgcttcagtattcaaactggaatggatcagaaaaaagaaagacaaactcggccgtgactacatataaaggggaaattaatttggcgtttttgttcactaatgaggaagtatataacagtgcctttggaaaaaaacgcagagcttcaggggctttcaggaaaacttattatgcagcccagccattattggggaagaaaaaccaagtaataatggaagctatattcggtgtgttaaatgacaaaaaattcggcactcaaggtttacttattgctaccaaagaaaacttatatcatattgcagataaagctggtgcccatagaataatcagctggtcatataacgaaattacgagcatcaccatcttaaaggaaacatttacagggtttcagatagatctcaaaacccataaagaggaattcttgattaagggaattcaagaaggggatcatgataagtttgtcaactacgtgagaaaagaaatacaaactgctcaaaaaaataatgatccgtcccctgcccagtccactcaccagtatttatctgattttgacatgatagcttcagaaattagaaaatatgctgagttaaaagaagaaggtcttttgacagaagaagagtttacagcgaaaaaaaagcagcttttaaaattatagtggccctatgggcttttctttcacaccaaaaacagaacatacattccctctatggtggtgtttttaatgtcaatccagttatcgtatcttgaagaagaagtgaaaaaaatctattacaaattaaatattgagactcctgaagacattgatttagaaaggattgccgcggcatttcgtatctggctgcattatgagcaaagagaaagctgcatgtttcaaatcaacggtgagtatagcgtcgtccttgatgctcgtgcctctccacaagaacagtggcaagactttgttcatgagctatgccatgtcttaaaacatactggaaaccaatttcacatgaatagaatgttcaggcagcttcaggaataccaggcgaacagttttatgtatcacttctgcgtaccaacgttcatgctcctaaaaatgcagctgccccgtcttaaatcagaagtcattaaattattaggagatacatttaatgtgacatattcctttgcggctaaacggttagaaatgtatgagagaaaaaaattttcagataaaatctattcaatgaggtgtaaaagatgggccattggatgccaagaggtaaaaagtctttcttattagtagttgagaatggatacaataccaaagggaaacgcgacagaaaaactaagactataaaaatcgaagacccaaagattcttaacagcacaaggaaaagagaaaaatatttaaatcagcagcttcttatgtttgaaatggaagtcacttcaggagaatacatatcacctgaaaaatcaacgtttgaatcctttgcaaatgaatataaagaccggatcttgtataaaaaattcgctcaccgaacatctgaaatgcatgaaagccatataaaaaactatattgtaccctcaatcggtcacaggagattagatcaaattaaaacaatgcatattgttgattttatggattccctagaaaaagacggaattcgtaaagacggcaaagcaggaggtttatcaagttcaaccagatacgatatattcaaagttttgaaagcgatgtttaaagttgccgttaaacaatggaaactcattaaatcagatccaacagaagatttagatcctcctactgttgaaaccaaagaaatgcaattttatgattcagaagcagctaaggagtgtattgaggctctgtatcagattgatataatgtggagattgtattttttaggcgcaatgattggcggtcttagaagagcagaaggattagcctttgaatggcacttagatgttgattgggatgcgggaggtttttatgtaaatcgttcaattccaaaaacaattgacggaaaaccgcttatcaaagatcctaaatcaaaaaaatccaagcgctttgtaaagatgcctgattggtatatggatgagcttgagaagtattatagaatgtggaaaaaagagaaactgagattaggtgatgcttgggaaggtggagaacatcaatacgttttccatagtgggaaaggaaagccctattattacacaacccccaccgcaaaatggtccaagttcaccaaaaagtatggactgaaaaaaatacgactacatgagttgcgtcacacaatggttactttattaattgaagccggcgcaaattatagagcgattcaagaacgagtcggtcacgccagttatcgaactacattcgatagatacggccatgtaacaaaaaaattaactgatgagacagctgaatttttcaacaattttgaccctaaaaagagatacggacaataaatttcgagccaaaaaatcaaattcgccaacagtttgccaacaacttccgaatttgataaaccggccttattaagagaaagtaaaaaacccttgctacgcaagggttctggctatgattccgactgggctcgaaccagcgacctctaccctgtcaaggtagcgctctcccagctgagctacggaatcatgatatgtatgtgttgctgggtatgttgttgtctctctgacatttataattatatatcctgatttctcattcgtcaacactttttttatctaaaataaaaaaagggcgcgtcacaaaattgacgacgcccttttcgtttatgatctcacttgggtgggggttatttttttcaatgcctgttcgaagtcccgctctaaatcttcggggttttcgactccgacgctcaggcgcagaaggccgtctgtgatgccgcgtttctccctctctgctttcggcatagcggcatgcgacatggctgcagggtatgagagaatggattcgacggcgccgaggctgacggcaaataccggaagcgatacgttttcgaccagctttttgacggcttctttgctttccaattcaaaggacaggacggcgcccgcaccgctcgcttgacgtttatgggtatcggctcccgggtgtccggcaaggccgggatagtaaacgtttttgacggccggatgcccgtcaaaataggcagccagccgctcagccgtccggctcgctttttccagtctgacctgcaatgtttttaagcctctcaatacgagccagcagtcctgaacgccgagcaccgctccaaatgaattttgcagcttatacagctgattgccgagctcttcatcctttacggcggcaaggcctgacagcacgtcgctgtggccgcttaaaaatttcgtcgcactgtgaagcacgatatctacgccgagatcaagcggccgctgcagagcaggcgtcatgaaagtattgtcaaggtatgtcagacagccgtgatcctttgccagtttgacgacgcccttaatatccgtgatgccgagcgtcgggtttgacggtgtttccatataaatggctttcgtgttcggccggatggcgcgggcgaccgcttctgtgtccgtcatatcgacaaaggtatgttcgattccgaaacgggacagaacctcagtcaccatgcggaatgttccgccgtacacatcctccgtgacgaggacatggtcgccttgggataagagcagaaacgccgtcgaaatcgccgccattcctgagctgaaagcaaaacctctcgttccgccttcaagacctgcgatcgtttcttcaagcgctgttcttgtcggtgtgcctgagcggctgtagtcatatgtcccgaattcttcaaatgaagactgatggaatgtggaagcatgctggatcgggacgctgacggctccggtggctccgtctgttttaaatggattgtgcacgagctgggtttccagcgtccaattgtgattactcatatgacacggccccctcttttacttgctgtaatgcctgctttacatcccgcttcaaatcttctgcatgttcaatgcccactgaaaatctcagcagacggttgcagacgccgtttgcgatacggatgtcttccggaatgtccatgtgcgtctgcgtcgcggggtatgtaataaagctttccaccccgccgagactttctgcgaaacagatcgttttcagcgcctttaaaaacggattgacccattcctctttttgcagccggaaagacagcatcccgccttttccgggatataacacgtcggcgatttcttcttcctgttctaaaaattccgcaagttcacgggcgttttcttcatgacggcgcattctgagtccgagtgttttcatccctctcattaaaagccacgaatcaaacggcgggagaacggctccgatcgcattttggtgattaaacatgatctcgccgagctcttcatcctttacgacagcaagaccggcaaggagatcattgtgcccgcctaaatattttgtggcgctgtgaatgacgatgtccgctcccagttcaagcggacgctggagcaccggggtataaaacgtattatccacaatcaaaagcaggccggcttctttcgtaatccgggcgattttttcaatgtccgcctcctgcattaacgggtttgtcggcgtttcaacaaataccgctttcgtgttttccgttattttggagcgtaaacagtcttcatcgctgaaatcatcataaataaagcttaagccgtattttctccattcgttttcaaacaaacggtacgtgcctccgtataaatcggaggatacaatcaattcatctccgcttttaaataaagccataatcgtttgaatggctgccattcccgagctgaaagcaaagcctctcgcaccgttttccaacacggcgatagcgtcttcaacgagctggcgtgtcgggtttttcgtacgcacataatcaaagcctgtagattctccaattcctctatggcgataggcggtggacagataaatcggcggactgaccgttcccgttgcttcttcgcttctatttccgatttgggctaattttgtatcaacatgctgcgtcatcagtaagcaccatcctttttcaaaataaaaaagccccctcttcataagaagaaggagcttttctcttcctcttatcttccaagcatgtgaatcgcttgctggatttagcaccttggcactttgccttcccgcggcaaagcaaaccggttgctgaggtttcaaagggccagtccctccacctctcgtgataagaatattgttttgtattttctgattgttctatattaacgcactataaaatgaatttcaataactttttatttatctgaactctcgcaagaagtgcatctgaagaaagaaatttctaataattcatggtacaataggaaaaaaccatcaagacaagaagcggcctggaggaatgcgaagtggcatcaaaaaacggaatcattcatgagaaaaaacttttctcccatgagcttgaagaggaaatgaccgttttggtctacctgcccgccaccttctcccccctgtataaatatcatacgatcatcgctcaggacggccatgattatttcagattagggagaatcgggcggcaggcggaagagcttatgtcaaaaggggaaattgaccgctgcatcattatcggcgtcccttataaaaatgtgcgggagcgaagaaacacataccatccagaaggctctaagttcgcctcatataagcgatttatcgcaaatgagctcgttccttttatcgacaaagaatacccgacttatcaagtcggatacggccgcaccatgattggggattccctcggcggaaccgtttcgctcatgacggcgattgactatccgaacatgtttggaaacgtcatcatgcagtctccgtatgttgacgggcacgtgctggatgccgtccggcagtcggaggatctcaaacagatttccgtttatcatcaaatcggagaaaaagaaaccggcgttcacacgacagacggccaggttcttgatttcaccgcgccgaacgaagagctcaaacagctgctggaaagcaaacagtctgaatacacgtatgaaaccttcgacggggatcataaatggacctactggcagccgctcatcacgccggcgctgaaaaaaatgctgtaaccattcatttaaggagggaactttcatgaaatacggtattgttttatttccatcaaaaaaattacaggatctcgcaaattcgtaccggaaacgctacgacccgagctacgcgctcattcctccgcacctgacgctaagagatccgtttgaagcgacagaacaggaaatcgagcaggtcgtatcacaactgagacagacggcgaaagagtcgcatccgctcgttctgaaaatcacaaaatacagctcgttttctcctgtgaataatgtgatatatatgaaagcagagccgacggaggaattaaaatctctgagtgagaaatgctactcaggagcattatccggcgagccggaatacagcttcgttccgcatgtcacggtcggccaaaagctgtcgtcagatgaacattccgacgtactcggacagctgaaaatgctggacatttcccacgaagaagtcatcgaccgttttcacttgctctatcagctggataacggctcatggactgtgtacgaaacatttttattaagcggaggagaataactgcttggaatccatcatcgcaaaaactgaaaaacagctaaacgacgcttttttcatcagaaaagaggtctttgttaaagaacagcacgttccggaagaagaagagattgatcaattcgaagacacgtcagagcatatagtcatatatgacggcggccagccggtcggagccggcagatggcgcttgaaagacgggcatggaaaattagagcgcatctgcgtgatgaaaagccatcgttctttaggcgtcggagccatcattatgcaggcgcttgaaaaagcggcggcagccaagggcgccgacagctttatcttacatgcgcagacgcaggcggttccgttttacgaaaaacaaggataccgcgtcacatccggcgaagaatttctcgatgcgggcatcccccatctggaaatgataaaggaacacaaacgataaaatcaaaagcactcctgttatatggcaggagtgctttttttatgaaaataatactatttcatgaattttattgcattttatggaaggttaatgtatgtttagtatgcgaagtattacaattcatacaaaaagtacaattcatatttcggagggataaacatgacggcaccaaaaggaaaacacatattcgggactgttaaagtgggtacaaaaggacagattgtcattcctaaagaagcaagagatgttttcgatataaatccgggggattcactgcttatgctcggagatgaccagcaaggtatcgcacttgttaaacaagaactctttttcgagtttgcaaaagatattttaaacgctaagcaaatcgatgaagatagcgaggatgagtaaatgcacgcgattgagctgaagcaattaacgaaacattataaagaaaccgccgccgttgaccgtcttgagttctcagttgagaaaggggaatttttcgctttactcggtgagaacggagccggaaaaacgacattaatcagtatgctttgcggactcctttctccggatgacggtgatgcatcagtgcttggacacagtattttgactgatttggataaaataaaaccgaaattgaatatgtccccgcaggaaacagccatcgctcctcatctaaccgtacgggaaaacttagagtttatagccggagtctacggaattccgaaaaaagaagcaaaaaaaagaacagatgagatgctcgaattgtttcaattaaaagagaaagaaagagcaaaaacaaaaacattatcaggaggaatgcagcgccgcctcagcatcgcaatgggaatgatcaccaagccggatatttatttcttagatgagccgacattagggcttgacgtccgttcacgccgcgagttgtggaaaaatcttgaggcattaaagggtgacatgacgattattttaacgacacactatttagaagaggctgaagccctggcagatcgtatttgcattttagaaaatgggactttaaaagcactgggtacggcggaggctctgaaaaagcaaactcattcagccacatttgaagatgcctttttagcgatttgtgacggggaggcgggtctttatgcttgatttcgccattcgcaaccgcaaagaaatttttcgtgaccccctgtctattatccttggaatcgcactgcctgttattctattgtttctgtttacggcgattgaaaaaaatgcgccgcttgatacctttaaaattcagcatttagcacccggactcattgttttcggttttgctttccttacgatgttctctgcattgctgatcgcaaaagacaaacagaccgcccttttgacccgtttgtttgcttcccctttaaaaacagccgattatgtcatcggttatgcaataccgatgctgccgttagccattttacaaatcgtcatttgttttatcgcagcagcggctgccggtttatccgccgagtggatgaatcttctcgcaggtatcgctgtcttgctgccgattgcgatgatgtccgttttcttcggtttatgtttaggggctgtgtttacggacaaacaaatttcaggcatcggaacgatttatattacactcgtgcaatttctgggcggggcttggatggaggtgagcctgctcggtgacacattcaaacatatcgcttatgccttaccgtttattcactcgatcgagctggcccaggaagtcatatccggagattattcttcctttcatcagcatatttggccgatagcgggatataccgttttggcgcttgcacttgctttcctcagttttatgaaaatcaggaagagataaaaaaagccggcactccgtaatgggagcgccggtcttctttattacgtttctttcagaaggcttatcgtatgcggcagcagacggtcatcccccggactgccatggcccggaacgacaatgctgatgtcctgatatcttttcatgactttgcggacggcgcgcggccactgatccggataaaaacccggagtaggcacgatttcctttgtttctaaagccttgattaagcatccgccgaataagagcttatccttaggcagccagacggtaatattgtcttccgtatgcccttttcccggataaaacgtttcaattttcatatcgccaaactgcagctttgtcacgtttttcaaatctccgagcggccggtcatatccctgctgtcgggcgaagtcggcggtcagtttcgtgctgtgcacctttacaccgtatttgtacagggtgttcagaccgccgatacgatcatcatgggcgtgtgtcacaatggcatcggtcatccttttgccgggaaaccgcttttttatttgtgtcattaattgctctgtgagactgtcattccacggagtatcaatcagtacgattcctttggaagtctcaagaagcaatccgttcgcagggacgggatttccgtctgccgtaccggtgcttgtatgcatccaaacatgcggcgccagctgtgtgagagtgacatcttttgctgcggagctctccgccgcgtgtgccggtttcattccggcagtaaagaggccgaatagaaataaccccgcaattaataatgaaagctttctcaaattgaatcattcctttccgcatctttcatatatacgacctcaaaaaaacccggatatatccgggctttttcacacgtattgatttatcaaccggccttttcccatgatttgcggcagacgggaaagagagcgcttacgtttttcctcatgtactttcttttctgcggctgcggtgttttcctggcggcgctccacctccctgtacaccctgtcattggcaagggcggccgctttcgtaatgccggcataatcagacttataacccgctgcccggtttgcgtattgagaatactgctggttttgaatccgtcctgcataaatcatatgtacccctccccttcgcttttcatttcccttaatcttactttttgaaacgctgttcttttgttatgatattctttgtctatcaaatggatgaacaccttttaatgggaggacccctttttgaaatgcgcccgactgaataaccgaacgatacatttacatacatattctagagaacattaccaattcctttttgaagaagctcagaaaggaaatattttttgcgcacattgtgagcagcccgtcttgatgcggctttcgattttagagcagccggcattttatcaccggcaaaagggagacttcaccgcctgtgaaaaagcatgcgcggccgaggaaccacaagcggagaaagaaaaagaagagtataaggaagccggcatgttccgcctgccgaaaggaaaagcgatttcagagaatccgaaaccgatcgtctcagaatggaaaagcccgaaaaaagtgcctgcggccgaaccgttttcaccaacatccgaggcggctgatacatctttgttccccggcatcggcctgaaccgtgaacagatgaaggcagttactgaaacggacgggcctttattagtgcttgccggagcgggaagcggaaaaacaagggtgctgacagcacgcgccgcccatatgattgaacacctcggcatttcacctgagaatatgctgcttgtgacctttacgacaaaagccgtcgccgaaatgaaagagcggatggcgaatgagtacggtctggcagccggaaaagtctcccgtctcgtgaccggaacattccacagttttttctataaaatactctgtcattatgattcttcaaaatggaacggcagccagcttttaaaaatggagtggcaaaaagagcaatatgtgaaaaaggcgctctatgaagaaaatttggatgaaaaagagtttcccgtcgaccaggcgcttcagcttatcggctgctggaaaaacacgtatctcccccatgagaccattccgcttgcggacgactgggagaaaaaagtgtacaggctttacgaacattacgaacggcagaagcgggaaaaacggcaatttgattttgatgacatggcccaaggctgttatgaactgtttcaaagccggcctgatattctcgcgcagtaccaaaacagattttctcatattttgattgatgagtttcaagatatcaatcctgtccagtacaacattatgcaaatgatcgcaagccctgagaataacctgtgctgcgtgggtgatgacgaccaatccatttatgcgttccgcggcagcagcccgtctttcattttagattttcagaaagattacccggcagcaaagaccatttacttaacggcaaattaccgatcgcctcatccgatcgtctcaagcgctcatgccgtcgtaaagaaaaataaaaaacggtatgaaaaaacactttctgccgtcaaagacggcgttcacaatcccgtgatgttttatccttacgatgaagaagaagaagcgaccatgatcgtttcggatatgaaagagaagattcaaaacggggcgagtcctgacgattttgccgtactttaccggacaaacagcgccggacgggccatttatgaaagactgcatcaatcatcgattccttaccatgccgacaggggcgtgcagacgttctacagccgcagaatcgtacgccagatcctcgcctacttatatgcgagtcagaatgaagatgatccggatgcggtgaaagacctgctgcccgccttatttttaaagcaatccgccctgcaaacgttaaaggcgctgtcaattacggaagattgcacgatgattaaggcactgacgaaactgcctgacctgaagccttttcaaatagggaagatcaagcagatcgttccgtttttcgcaagcatccggacaatgaagccggttgaagccatcacctttgcagaaagcaaaatgggtttttccgagtatttaaaaaaacggggcaatgagggaaacaaactggaaaaaggctctgatgatctcagggatgtcaaagtggccgccaaaaaattcaaaaccattcccgattttcttgcgcatgtcgatcatatgcgcgccgctgagaatctgaaaaccgatgaaaacggcgtcgaactgctgaccattcaccgctctaaaggtcttgaattcaatacggtctatattttaggcgcggctgacggctcgatcccccatgacttcgcacttgagacggccagacagggcgatcccgctccgctcgaagaagaaagacggcttctctatgtcgcaatgacaagggccatgcagcatttatatgtatcttgtcccgcgtacaggcggggaaaaacagcgcgcagctcaagatttctcgagccccttcttcggacggacagacggagcgcactcaggatataaagaacccggcagatcactgccgggttcttctcacataaaaaggcctttttagcaaggccggctgacgcctatttattgttcagcattttagaaatggtgccaaaatcaagtttctctttaccgcttgtaatagattgaacgattttgtcttccaattctttcggaacacgcttgttagccagctgggacaccttctgaatgacgcctctcaccgtgttttcatctttgaaattggcattttgcaatgatcctgcaaggttcatgacatccttcatgctgacgcctgttttcttctcaatatttttgaaaaattgattatccatggtgtgcctccttttgtggagtaatacgatattgtatgaataaagagcggaacatgtgcccgtaagacaaggaaaaaattccgagtgccccgtctctatactccttcatacatcagggaagcacgggactgaacggtcccgcgcttatccaaggtcttgctaaggtttagccaaaaaaggatgcaccgacaatgatcagaaggatgaacaatacgacaacaagaacaaatgttgagccgtatccgcctccgacatagccgcctccgtatccgccgcagccgccataaccgccgtagccgccgccgaatccgccatatccgaatcccatatctaagcacctcctttactccctatactctatgtgagccgacttgtttggcttggataaatgcatagggccggtgcggatttcattcattttagtgagaatgctcatttttcttcagttttgcttctgtttcggcggcaaacacatctatccattcctcaaagcgcgatcccgcttcatcaaactcagacagctgtttttcaatagataagatatatttgtcatgctcccgctggttttgattgtgccggcggtatttaccgtttatgaatgattcaaatatattcataacatcccctcctcctatgatctatgccgaacagaggccggcgttcggcaaaaaacaaaaaaaccggaagctccggttttttagaaaacggctatttcggttttttcttttggccgcagccgcagccttttttcttgatttttttttcgtaaggctgatgcacagttgatttgtatggagaatgttgggaaggtttgcttgattgactcatggtgatccttcctttccttatgtcatatatgccagtttatgccgaaggtgacggtaagttgctggtggaaccgccttattcctgcagaagacgagaaaccgcagcttcaatgatcccggccgcgccggctatggctaacagcaaaatcagccattgcgcagcctcgggtaccacaatctggaccgcaattaaaaaggcggcacaccacacgcccgtacaccagtagcagctgagaagttcaccgataaatgccctgatgccttttccttttatgacaatgtaggtttctgtcgtgccgtcgggtgcggtttctgttttttcctcgtgaaaaaggctccgaagcggcgccataatggtgtcaaatacgaaaagcctggccagccggaaaacggcaaacgataacagaataaatgaaagccaattgataaccacctgttcactccttttcaaaacttgacctctttatacatatgcgaaaaccctgatcttcatgaatcgcaccttgtccggtaaaaaaataggtgcggtttagttgtttttcttattccgctcggcgtttcatttgcattatataaagtatgaatgagaaaggagtgaaggttatgtcgtttgaagaaaaagtcgaaacactgcaaccgcaaatatacgaacaattatccaacgaattcgagcagacgatcgaagtgattgattgcgaaaatgtcacaatagatacaacacatataacggccgctctttctatacaagcctcagttactacggcgattatcctcgcgacacagctcgcgatcgcagatgaagacacagccgaccaaatagcaaccgaactgctgatcctggatgattgccaaataaaaaagaggaccgtcattcaagtcctgaacagccgcaatattaaaatcacactgactgcagacgatattatggcctttgtacaaattttgtttcaattattaaatatactttttgctgaactagacatcctttaacctttcttttcaaatatttaaatagaggtgagaataaatggcagataacgaaaaattaaaaaaagaactcgaaaatctaccagaagtggatccgcttttaaaggtgcttgtcagcaatgtcttcaaaaaacacggcgtgacaaaagataaaatgcgggaaattcctgatgaagaaaaagaaatgctgatcgcattagtcaaagacatgcaggcaaaaacagaagcttttcttgaaagccagaaacagaaaaaagagcagggaaaagcgcaagatcagcagaccaatccgcaaacccgcagagaacaattaatcgaacagctccggcaaagacgccaaaatcccggtcaataactaaaaaatagtgatttttatcaggatagatgcctgagtcaaagtaaggggccggctcatttaataatagtaaaagaaaaggaggaatagatatggaaagcagaccatactcttgggttgcacttgatcctgaatgcgaacatccgcgagaagaaaaagaagaaaaagaaggcagaagatgtaatgtttgctgtaacggacatggatttggcgaagataatgccttccttgaccaagaccttgctcaagcgaatatcaacaaacaagtttctgaagaagcgattattatcagagactcttgtgatattaacgtgacgtcaacagacgttcaagcagtcgcttcagtcatgacagcgattaatgcagcagtcgtaacggccactctcacttcaattgctgacggagtcatcgctgaattggtcgcacaagacttattgcagctaacagctaacaaacaaatcaaccgtcaaaaactgctcatcgaaaactcccgcggcgtaaacgtgacaacagtagatgccgatatcgcagttttgatctcaacagcgacaaatttactgattgctgtcttagtcatcacccttgtcctctaaaaagaaaaagcagagctaaaaatgctctgctttttcttattttctccgcatatgatgaatatatagacgttcacccacaccaagtgaggctcgcgtacatatgttgttaaagacaaaagtcaaataccctaaaagaaggagctgaaatccatgagctgcggaaaacaccatggccgagatgaaagttgtgtatgcgatgcagtcgagaagattttagcagaacaagaggctgttgaagaacaatgcccgactggatgctataccaatctgttaagcccgacggttaccggtaaagataccatcccgtttctcttgtttgataaaaaaggcggtttgttctccacattcgggaacgtcggaggctttgcggatgacagccagtgcttcgagtctattttcttccgggcagaaagagtttgtgattgctgcgcaacgctttcagtattgcgccccgtagatgtgcacggcgacaccctcagcgtctgccatccttgtgacccggatttcttcggtttagaaaaaacagatttttgcattgaagttgatctgagctgcttcagcgccattcaatgcctttcaccggagcttgttgaccggcctgagccgcacaaagagaaaaagcatcacggatagtcattgattcgcatctttcctaaagaagaatccccttccaaccttctattacagatgcaatcatcagcccgcccggatttccgggcggctgactctccgatatcgtttaatccggtatataaaacgtgaagtcaggagggatattatgagcaagcatacaacatactgtgtgcgtgaagcggtagaaaatattgaagacctgcaaaatgcggtcgaggaagattgcccagccggatgcttttccaaccttttatcgccgggtttttcattaggcgatacagtgccgtttgtgcttttcacttctaaatcatcaccgtttaccgcattcggaaatgtcggcgagctggataacggtccgtgttttaacaccgtttttttcagagttgaaagggtctgtgacggctgtgccacattaagcctgcttattgcttttgacgagcataagcacattcttgattttacagataaagactctctctgcgatgtattccgtttagaaaaaacgaactattgcgttgaagtcgatctccatagcttctgcgccattaattgcctgaacccgagactgatcaaccgcacacattcttaaatcaaaaagcataaaaataagctgccggattaagaattcaggcagctttttgtatggttaaaatccaagcggatgcagcgaggtaatatcgtctattgcgagttctgccggcgctccgttgcttgtcgtccgcaggaagatcgcattattttttctgccgacgattacgcctctgtaggttttcccgttggcttctatcagacaaagggtccgcggcatattatgcggcagcttcgttaagaaatcaattttttcaagaatggacattctgctcatcggctttttcacgcgctttggcggaaccttttcctctggggcggcattgtgaaccgcttcaggctctttttcagcggcatcaggctcttttttagcggcgtcaggcttggcagtgtcctgctctgcttgcgccggaacttcttgaacggcttcttctgcgcggctgtgctgttcaggtacttgcttttctggttcaacagccactgctccttcaggctgagtttgacattcttcctcccgctttccatgcatcggctcttcttccggcggctgaggcgctttcctttttttgattaatatgtcctgcattgatgattgcgtgtctgaataatccgcctgaacaatatacatgagcggttttttttccgcgtttctgttttgttttgacatcttcatccctccgattctgtcatgttttatttatatgacggaatgattaaaatcagaagaaagaaaaaagcaatccctgaaagggactgcttgttatttaacgtgcggtaatatggaatcctgaatcaacgtgaagattttcgcccgtgatgcctcttgacaggtcactgaacaagaatgcagccgtgtcgcccacttcttcaggtgttgtcgtgcggcgcagcggcgcgcgctcttcaatttctttcaggatggagttgaaatcactgattccttttgcagacagcgtacggatcggtcctgctgaaatgctgttgacgcggatgttttcttttcctaggtcagcggctaaatatcttacgctcgcatcaagagacgcttttgccacacccattacgttatagtttgaaacgacgcgctctccgccgaggtaagtgagtgtaacgatgcttccgccttcagtcataatcggacgcgccgcttttgcgaccgctgtcagagagtaagaactgatgttatgcgcaagcaggaatccttcgcggttcgtatttaaatattcgccgacaagctcttctttgtttgcgaacgcgatgcagtgcgcgatgccgtgaatcacgccgacctgctctttaatgctcgcaaagcaagcttcgatctcagcgtcatttgtcacatcacacggaaggatgatggaatcatttctttctaatgtagccgcaaggtcatgaactgatttttccaagcgctctcccgcgtaagtgaaaatgaggcgcgctccggcttcatgcagcgaacgggcgattccccatgcgatactgcgtttattggcaacgcccatcacaacgatgttgcggccttcaagtgagaaattcatatgtataaagcctcctgtaatcgtcttaaagacatagttttagtacctgatcttaatttttatcatatcataaccttgtccagattgaaagcatgggaaaaagaccgcggatgttgaagcggtctcttttttatctcgtctgcagactgttccttttaaaggcaaaatgattggtcgggccgtgtccctctccaatgccgagcgtatgttccacggcttcccgcacaaaattgacggctgtctcaaaggcggtctgaatgtttttcccctttgccgtttccgccgtcagcgcggctgcgaacgtgcagcctgttccgtgggtgtgtttggtgtcaatataggcgtggctgatttgggtaaaagacgaaccgtcaaataataaatcaacgatcctcccttgttcaggctggtgtccgccttttatgatgacatgctttgcaccaagcttgcaaaggcgttcggccgcttttttccggtcctcaaacgtgcggatttccattcccgtcaatacctcagcttccggaacattcggcgtcaccgcatagctgcgcggaattaacagctcttttaacgcggcctgagattcctcacgcagcagggaagcgcctcctttggcaatcatgacggggtccgtgatgagatgatcaagcccgtactgatccgttttttccgcaatttccgcaatcatttctgcgctccacagcattcccgtttttacagcgtcaggccgcaaatcttccgccaccgcgtcaatctggctgcccagcgcttcccgggtgagcggataaatgccgtgaacgcccaaagtgttctgggcggttaccgctgtaatggctgacattccgaaaacgccgagctcctgaaaggttttgagatccgcctgtataccggcgccgcctcctgaatctgatccggcaatcgtcaatgctttgcatatgctcatgatgtttttctctcctttcgcattatccgatccatttatgataaaaggatttcgctctgctgatatcacttgtgccgtgtattaatgctctgccgtcacgaaacagtaccatcttgaaattgtctttgcaaaacgaaattaaatacgggttggctgaaacatcaagccctgtccgtctgagctgtcccgcaagtttttgcagatcaaactgttcagagatccccgctctgatctgcaccgtgttccgcccgcacagaaccgccgcttttgtctgattttcataggataaaaacggataatcgttcgtgccgcagcttgggcaatcagccgacttaagacgggcgacgtttatttctgaccgttcatttttccataaatcaaaggaacggagaacatgctcgatagatccgcccgttaacagtttcagcgcatctgctgcctgaaaaacggccgtctgcaatacagccgggctgatgattccccccgtatcgcatgtcataccgcctaaaggcaatgtctcaagcagacaatgaaggcacggcgtgacaccgggaatgacggtaaaagagagcccgtagctgccgacacaggcgccatacagaaagggaatccctttctgcacagccgcatcattcacaatcagcctcgtttcaaagttgtcggcggcatccacgatgagggaggcgtcacgaatcaatccgggtgcgttttccgcagtgacatccatgacaaatccctcgacctctacatcactatttatagatcgaagccgtttttcagccgccgcggctttcggcatttcatttcttacatcgtcttcggtataaagctgctggcgctggagattactccactccacataatctctgtcagcgatcgttaccttcccgactcctgctctgacaagcatctccgcacttgccgtcccaagcgcacccgcgccgataatcacggcatgagacgaccggagcttctcttggccggagggaccgatcggctgaaacagctcctgtctggaatatctgtccgtcataccggaagaccgtctcgcggactgcttgcagttccgtaatctttcaccggaattctccccgcttcataagaaagacggcccgcttctacggcaagcttcatcgcccgggccattttgaccggatcatcagcgcctgacacagcggtatttaacagcacaccgtcagccccgagctccatcgcgtaggcggcgtcttttgaagatccgacgccggcatcgacaatgatcggcaccttcgcctgttcaatgataaaggatagattcagcggatttaaaattccctgaccggaaccgatcggcgaagcgcccggcataatggcatgcactccgagctcctcaagacgtcttgcgagcacaacatcatctgacgtatacggaagcacgataaatccctcttcgagcagctgttctgatgctttcagcgtttcaaccggatcaggcaaaagtgaccggctgcacccgatgacttctacttttatcatgtcacaaagccctgaagctttggcaagccttgcgattctgaccgcctcttcagccgttgcggcgccggccgtattcggcagaagcgtgtatttagacaaatcaagctgttcaagaaagttaggctgagactcttcaaagatgttcatccgccttaccgcaaaggttaaaatatctgattccgagacagccaccgcctctttctgaatctcaaaactcggatattttcccgttcctaacagcaatcttgactgaaactgttttccgcctattgttaacatcctcatccgcctcctacaaaatggacaatttctatgacatcgcggtcacacaaactcgtattttcataattctttttttcaatgatttctttatttctctccacaactacgattctttgatcaagctggtacgattcaagcaaatcctgaaccgtcccctcatttcgattccaatcaatttgttttccgttcagctgaaggatcatatatgaacagcctccttgcgatcaattcgaaacgcttcttcccattcctgcttaatctgtcttcccaggatcatatcccgcaccatttcagccgttgccggcgccaacaggatgccgttccgaaaatggccggcggcgaagatgatgccgctgtcttcaggatgccgcccgataaacggctttccgtctcttgttcccggcctgagacccgcccaaaaccggtctattttcatatgttcgatggcgggaagcatggttttcgcttttgcaatgacggcctcaattcctccgatgtcaggcgtatcgctccagtcgccctgtttcatcgtggcgccgatgacaagccggccgctttttctcgggacgacataacaatgatcatggtaaagggttttggtcagcgggatatcgtcattccacacggaaaggcattctcctttcacaggaaaaaaaggctgtcccaagccgagctggctgaaaaaccggccgctccatacaccgcttgcaactgcgactttgtcagcataaacatcaccgccggacgttgtgatgcaatattctccgttcacccgttttacggaggtgacttgtgtatgctcatatatgtcagcgccatagcgccgcgctccttttgcatacgctttgcaaacatagtacggttcgacatggacatcgtcttttatataacttgcgccgagaatgtcttttgaagcgtaaggctctttttcaagggcatcttcggctgaaagccaggtgacggaaggcagatcatccatcttccgtagacggacgatatcttcttcggtatacgccagtttaagcattccgccgttatggcgcctgatgtcaatgccgcaagcttcctcaagctcttgccccgccgtttcatacagcctttgactgtacatggcaaaatcaaaaaacgcatcccggttttcacattccgcatgagcgcccagcattcccgcggcagcgcttgtcgtttttcggccgacttctccggcttcaagcaagacaacgttctgctgcgtcttcgccagctcataagaaatggcgcatccgataattccgccgccgatcaccgccgtatcatagtgcttcttcataatcggcctcccttaccgcgcgtgcataccgttttgccgcctcctcaggattttcagctgagaatatacctgacatgacggcaattccgtccggtttcgcctgctttgtgtgtccgatcgtctgcagtgtcattccgccgattgcgatgacggggatggaaagcgtgcgtttgatctctgaaagcaggctgatgcctcttgcttcaagtccttgtttacattcggtttcaaatacatggccgaacaccacataatccgcatcttccttttcagcttggatggcttctttcagcgaatgaaccgaacgtccgatatgaagatggggaaatctgcttcgcacctgctttacggaaaagctgcgggacggaagctgaacacggtgtatattggcaaaaagcgcgatatccgccctgtcattgatgatcaatttgtccttatccgcaccgccctttttcaaaagggtcaaaagctgcatgatttctcccgctgttttatcccgctcacggatatggataaagcttacttcgcgctgaatcgaaagaatatcttcggccagctcggcaacggatttgcgattatcagttaccgcgtgcagctccaaaagattccacctcttttccgcccttctcggaccagccttctttttgataggccattccccaaaattgatattcataatagcttgaaatcacaaaattctctttcattttcgcgcggatgtcctctgtgctgttttcagcaatctcgtcaaaacggctgatctgttcttcgacttgctgtctgaaccagtctccgccgtatgtaccgatccatttttcataaatcggatgctccggtttgcactcctttaagtgttcgccgacttcataataaagccaataacagggcagaagcgcagctaatatttctccaaaattgccgctcatcaccgatctgtacatatgagacgtataagaataggcggtcggtgccggtttaaatgccgcacgctcttcttccgtaatccctaaaagctccgtaaactcgcggtgcagcgccatttccgcttcatatgtcccttgagcgtggcccgccatcctgcccgtcgtaaacaagtcttcggcatatgcggcgccgaacgcctgaacttttgcaaaatgcgtcaaatagtaggaatcttgcagcacgtaatagctgaaacggtctatcggcaggcttccgtcaccgattcccgttacaaacggatgaacaaaacttccgtcccaccattcggcagccgcctgtctgcattcttcagaaaatgtcatcatgtcttcccccctgataaaataaaaaaaccactttcccgcatcggaaaagtggtttggaatttaaatggataaaaggaaccccaaaaaaataccgctccacttccctacgcaggtctgaacctgttcaagttatgagggtctaaaagtctcacttttatctcagcccttatgaaggacacccctagtggtcatacgattaatgatttatttgttatgccttctatattatcacgaattgcaatttggtcaagcttcaaggatttttctcagttccgacacgtagttgcgcgagcccgtgacgatgagacggtctcctgttttcagccgcgtgtctccgtgcggaacgatgctgtccacacctctgaaaatccggacgaaaatcacatcgcccatcagcggaaattcccgcagaatgatgccgttatacgccgggttttccagattgatctgatataacgaagactcctcattcgtcaggaggctcatcacgcccggcgcctcaattaatgcgcgcaagagcgtctttgtagacagaaggatagaaaaaatactgatgccctcttctttcagttttgtttcatgctcaaccgagccgacgcttgcgatgatacgctcagtccctttctctttcgctattaaggcgatttcggcgttcacatcttcatttcccgtcgccacgacaagaatatccgttttgaaaataccgtgcgactcaagcgtgccgggctcgtaatcagaaatcgtgtcaaccgaaaaaacggattccgcaagcgttttcccggcattttcctgatacacatggacgacccgtacttcatattcctcatcgggcaattccagcgtaaccggaagtgtcatttggttggcgccgataaatgtaatgcgctttttttcctgcggcgcactttgccgtttgtataatttcttaaagccgatcggcgtgatgatgctggcaataaccgcaactaaagtcaacgcgccggacatattggcgctgataatgtggagcctttctccgatcgtagccgccgcgataacaagcgacagcgtggacgtcagcaaaaagcccgaagcaaacacggttcttttgtcataccatttctttaaataaaacaccggaaacattttgctgataaacagcgcaagcagaagcagcggaatcatcgttaatgttttcggatcttggaaaagcgtccaaatgtccaatttcaccccgaccatgacgaaaaagatcggaattaaaaacccgtagccgaaggaatccagctgttccaccatttctttattcggagacagaagcgataccagaacgcctgccaaaaacgcgccgagaatattttccgccccgagagattccgataaagcgacaagcacgataatcagtgtgaaaatggctctcgtgccgatctgcacggtgcctttagacatcgactgcacaaatgaacggtgtttaaagatcctgccgaagaaatacagcacgacccccgcggcaaagagaatcaacagaagccacatatttccgctgtcttctccgtaaagagaagagaagaaagcgagcagaatcatcgtagccaagtccgcgataacggcgacaagcaggatgatctggccgatattggagttcatgatccgttcttcctttaaagtcgggaccaccacaccgagtgatatcgtcgaaataataagcgtcattaaaaatgcgttttgaataaaaccggctaatacaaaggcataggacagcagcaatgataaaataaagatgccgaaaaagataatcagtgcggcagaaaacgtgttgggcgcttccttgccattcggaaggaattgttttttcttccctttctcaaatgaagaaaaatcaatttccaagccgcttaaaaacattaaaaagataaagccgagaacagacagcgtctccagccacgtgtctccctgaacgacaagattcaggccgctttttccgataataagccccatgatgatctccgcgacgacgacggggatgctgagcttaaaccgatgtaaaaggagcggcgtcaaaaaagcgatgatcagaacgacgactaaagatgcgactgatgtgtgttccattcgtaaatacctccttaaaacaagggttataaaagcccgcttaaagcgggcgaaaccttacttttttttaaaaacataacgcatattctaacaaggctgaacgcgaaaaaaaagtgataaggctttatttctttaattctttttttaatttgtacaaaaacagcgtaattaggtataggaattagccgcataataaataaaaaaccgttaataaggaggctgacacgaatggcttatgacatcatcagcgatatacacggatgttatgacgaaatgatcgcgttaatgcaaaagctcggatatgaagtcaaagacggaacgcccgttcactctgaaggcaggacgcttgtctttgcgggggatttaacggacagaggcccaaaatccgtagaagtgatgcgttttgtggcaaaagcatatgaaaaaggagccgtccgttatgtcccgggaaatcattgcaacaaactgtatcgttacttaaaaggaaaccccgtaaaagtgatgcacggactggaaacgacggcagccgaactgaaagagctgtctcccgccgacagaacggaagtctccagacaattcatccgcttatatgagtcagcgccgctttatgacattttacataatggcgatctcgttgtcgcccacgccggcataaaagctgacgatatcggtaaatactcgcgtaaggtaaaagaatttgttctgtacggcgatatcacgggtgaaacgcatctcgacggcagacccgtcagaagagactgggccgccgcttatgaaggcaaggcatggattgtttacggccataccccggtaaaacgtccccggatcgtcaaccgtacaatcaacattgatacaggatgcgtcttcggcaatcaactgacaggctttcgctttccggagcatgaaaccgtctctgtggaaagctcaatgccctatgatgcctcacgatttcgcgaggatcacggaaggcaggcatgaaaaaaagcccgaaaccggcaaacggttcgggctttacatttgttcaattaatgttttcatatcgtcaggcaccggagcgtgaaaaacgagcgtttttccggtcatggggtgtacgaatgaaagccgctcactgtgaagagcctgccgcgcaattccctcattttttccgccgtacagtgtatcaccgactaacgggtggccgaggtagctcatgtgcacccggatttgatgcgtccgccccgtttccagccgcagggctgcaagcgtaaacgcatgtcccgctttttccgtttgaaaatgcgtcaccgctcgttgtccctccggcgttaccatccgctcaataatactgtcgtgttttcttccgatgggcgcgtccaccgttccttccttctgagacatgatcccgtgtacgacagcgagataccgcctgctgacaagcccctttttctgcgctgccgacaaaagagaatgggaaagccgatgtttggcgatgagcatcgcccccgatgtatccctgtcaaggcgggtgacaagatgaaccgttgattgcacaccgctttttcggtagtggctgatcactccgttagcgatgctctccgacgggtgttctcttgatggaattgaggagacatacggctgtttattgaccacaagcacatggtcatcttcataaagaatatcaagaggaaccggctcaggcaaaagcgtttcactcacatgctccttcggaaattcaatcttaagcacgtctccttccgctaacacggcgcggacggttacatgctctccgttcacaagcaggtctcccccgccgaatttaatgtcagcgagaagccgctttgaaatgccgagctgcgccgtatattcttttaccgtcatgccggcttcccgggcagtcatgttcttttggataaaaaagttgtccaatccgtttcctctttctattcgccttttccgataaaggaatcctgcacccttttccaaaacggaaaaggacggaatcttgcaaatctgactttttcatttgccacacggcatagaatggacttgacatccttatgcagcaaggttaaatgatcaattgtgacttgaaagtcgacgtcgtttctcggtttgatgacacagttatgatgatcgggaagcaaaagcggcgagccgacagtcctgaacactctgttgttgatggatgccatttccgcaagctgaatcgctctgatggaagggtggatgatcgcgccgcctaacgccttattataagccgtgcttccggaaggcgtggacagacataaaccgtctcccctgaacgtttcaaacagctggcctttaatttccacgtcagcgacgagactgccttctatgcttttgatcgtacattcgttcaaagccagataccgctcctcacgctcttcatcatgataagtgacaatcacctcaagaaggggatactccacggtatgatacggcgttttggcaatggccagaacaagtttttctatctcctgcggaacccaatcggcataaaaacccaaatgccccgtgtgaactccgacaaacgccgttttatcgagacggtcgctgtacctgtgaaatgcgtaaagaagcgttccgtcaccgccgacggaaatcacgatttccggctctttttcatccaaggtcatatcaaaatcgagtaaatacgcctgtattttgcttttcagtgtatctgaaacctcgtctccttttgaagaaacggcaaatttcatgccattcccctcctttcctactggtggtctcccgcttttttctttcgcgagaacgcggcttgggcttcctggatttctccgcggatttctgacatttcttcatcgagccgggatgcggcttctgaggcccgctgcagcctcagctttactttttcgggaatgttcccgctgtatttgtaattcagtgaatgctcaatggttgcccaaaagttcatggcaagcgtccgaatctgtatttccacaagaacgtgcttttctccggacgttgtttgtaaaggatataaaacgacaaggtggtaagaccgatatccgctttccttatgctctgctatgtaatcccgcttatcgacaacggtaaaatcttttctggcaaacagcatatttttgacgatctggatatcatcgacgaattggcacataatacgcagccccgcgatatcctgcatcgtttcaatctgatgaagcggtatgctttttcgtctcgctttttcaagtatgctcgccaccggcttcacgcggcctgtcacaaactcaatcggtgagtggtcatcttcatactcataaagggttctgacgcctttcagcttcacctttaattcttcaacagcctggcggtatggcgctagaaattgctcccattgtttgtcatccatcgtacatcccccaattccgaacctgttctaaagaaatacgtttttcactttttcttccatatctccgtagtttgcattatctttaatattttcaagaagataatcgagttcttcatgcagccctgaaagttcaaccgtttttccgccggcctcaaggaccgccggttttctttggtctaaggcttctttcagatccggccagatatgttcttttataatgacatattcaaaagagtcagctgattcaagtatgtatacaaaagcaaagtgatcggaatcaacaagcatttgacctgatgctttgcgttccgctccgcttaagtcctctccgcacttcaagcggagcgcgtcttctgttaatgatgcattttggatttcaattctcttttgcataatgttctccttttttaacaaagtacagcatttattttatcatatcaaggtcgatattgataaacgtaacctctaaagagataatgggaattatacaatttttcgtcctgaaaggaagactgtcatgacccaagaaatagaaattgaattcaaaaacctgctgacaaaatcagaatttctgaagctgagtgaagcactctgcatgaaagaacatgattttaaacagcaggtcaatcattatttcgacacgaaagatttttccctgaaacaaaaaaaatcagcactccgcatccgagaaaaagacggcgcgttcgttctgacgttaaaagagcctgcatcggtcggtctgctggaaacgcaccaagagcttgcggcacctgatcttgacgtcttcaagattccggatggccccgtcaaacgtcagctggaaggtctcggaatcaactcagaacacatttgctatttcggaacgctgtcgaccgcacgcgcggaaaaagaatcagaaaaaggcttaatcattttagatcacagccgatatttagagaaagaagactttgaattggaattcgaagctgctgactgggatgaaggaaaacgggcgtttgaacaattgctcaagcaattcggcatcccagagcggatcacgaaaaataaaatccagcgtttttatgaacagaaacaaaaaaaggtggaatgacacagtgaatatcacgaattgggcggcccttctccagctgcaatcaatctctcatacaagcacggcttcaggcggacaatcttcagaaagcccgctttcaaatttcagcgcgctgctcagccagtatacggacacagccgtccggcagcagccggaatcaggaattttaaacggtgtgcggaccgctcacgcttcatattcaccgagaattcccgtttcatccggctccgcggctgcttcacagaccgcttccccgggcataaagtctccggatgcggcttctgatatcagcaccggaaacttttcaatagacagcgccattcagaaagcggccgaaaaatacggagtggacgaaaagctgatccgcgcggttattaaacaggaatcaggctttaatccgaaagcggtcagcggtgcgggggcaatgggactgatgcagctcatgccttccacggcagaatcactcggggtgtcaaacccgcttgatcccgtccagaacgctgagggcggcacaaagtacctaaagcagatgctcacgaaatacgacggaaatgtatctctggcgttagccgcctacaacgcaggccccggcaacgtagatcggtacggaggcattccgccgtttaaggaaacacagcaatatgtcaaaaacataaccaaacagtattacgcgtaaaccagagaggcttccttcgccctctggtttttttgcggagtgaaatcttacacatgaatgaaggcgatgtgatatgatatgaaatacaagcgcctgacagaaaggcactttgtttgtagaaataaaatgttattgctaaaatatacagtaactgaagatagtaaaactgaaagataaattcgcaatgggaattatgattcctattagccatataaaggagtagtcaacatgggacaatcgtttaacgcaccatatgaagcgattggagaggaacttctatcgcaacttgttgatactttttatgagcgtgtctcgtctcatcccttgctgaagccgatatttccaagtgatttgactgaaacggccagaaaacaaaagcaatttttaacccagtatttgggcggacctcctctttatactgaagagcacggacatcccatgctgagggcaaggcatctcccctttccgattacggacgagagggctgatgcgtggctaagctgtatgagcaaagcgatggatcaggtcgggctggagggcgatattcgtgaatttctgtacgggcgtctggaactgacggccaggcatatggtaaaccagtcagaagcggaggatcgatcatattgacgaattatcagcatgagcaatacttcgcccattgccacggacatccaaaaaaaccgctcgaaatttacatgtttgtcgaccctttatgtcctgaatgctggtcgctggagcccgccataaaaaaattaaaaatcaaatacggacgtttttttacgctgcggatcattgtttccgcgagcattacatcgctgaataagcataagcggaaaaaacacctccttgccgaagcttgggaaaaaattgcgaaccgttccgggatgccctgtgacggaagcctttggcttgagcaggatcagcctctttcatcgccctaccttgccgcactcgctttaaaagcggccgaactgcagggaagaaaagcgggcattctgtttctccgcagcatgcaggaaagcctgtttgtttccaagcagaatattacggatgaagacgttcttttagaaattgccgaaaagacgaaattggatgttgaagaattcaagcgcgacctccattcgcaaagcgcggtaaaagcgcttcagtgcgatatgaaaatcgcggcggaaatggatgtcaccgtcaacccgacattgacgttctttaacagcctgcatgatgatgaagggctgaaggttcccggcaactattcttatgacgtgtacgaagagatcttattcgaaatgctcggggatgaaccgaagccttctgaaacgccgcctttggaatgtttcattgaatatttccggtttgtcgcatcgaaagaaatcgcactcgtttatgatttgagtctagaagaagttgaaaaagaaatgaaaaaactggcattcgccaaaaaggtcgccagagtggaagcaaagcacggtctgttttggaagtctctttccggcacccaggaggatgtcacctgttgtgatcattaaaaaaagctgattccttacggagccggctttttttgtgcaaataaagaaaccgcgccgggataagcgcggtttcatatgtcttaacgacaacaaaggggatgggagaaatttttcacggtcaaacaaaggggtaatgtttgtttgtgatcaatttcacatccttatcatatcaaatcttgtcgagttttgacaagccataagattaatgttcatatttttgtcacaaaacataactgactgcttgttttcatagaatatatcaatgaaaaacaaggagggaaatcaatgctccgcaccgtattgatcatcggaatgattgtgtttttcttctttttaaatctgctggccatgatgcacatgctgccgatttacattacatctcccctgctgtttctgtccatattgtttgccttgtaccggctgaatcacagaaaaacgtttaaagggttttagaaaaagcctgtgcaacttatgcacaggcttttttgaactacgaagggttcactttcgaaagaagctcttccatttcgttcagtttctcttcaaacattttgcaggctgcctcgatcggttcaggcgatgtcatatcgactcccgcttttttcagtatgtcgatcggatattccgagcttcccgcttttaagaattcggtatagcgctccaccgcaggcttgccttcttttaagatctggctgctcagcgcttgggccgcactgtagcctgtcgcatattgatacacataataattgtaatagaaatgcggaattcttgaccattccagactgatttctttatcaatcaccatgttgtcaccgaaatactttttattcagatcataataaagttcgttcagcagttcaggcgttagcggctcgccttcctgcgctttcgtatgaatcagatgctcaaattcagcgaacatcgtctgtctgaacactgtgcctctgaatccttcaagcatatggttgagcaggtacagacgctgtttttcatcctttaagctgttcagcatatattcaccgagcagcgcttcattggtcgttgaagcgacttcagcgacaaaaatgctgtagttaccgtacggatacggctgatattttctcgtatagtagctgtgcacggaatggccgaactcgtgaacgagcgtaaacagattattgacattgtcatgccagttcatcaagatgtacggattcgtgccgtatgtaccggacgaataagcaccgctgcgttttcctttattttcgtatatatcgacccagcggttttcaagtccttcttttaaaatagacgcgtattcctcgcccagcggagcaagtcctttgagcatataatctttcgcttcctcatatgtgaccttcattcccgaatcttttacaagcggtgtgtaaaggtcataaatatggacttcatcaaggccgagaacctttttccgcaggtcaatgtaacggtgtaataacggaagatgtttattgatcgttttaataaggttatcgtaaacttcttcagggatgctgttattggataaagccgcttcccgtgctgatttatactttttcacacgggcgtaaaaattatcttttttcacagtgccgctgagtgtagtcgccatcgtgtttttatactgtccgtatgttttatatacggcttcaaatgcgtttttgcggacttcacgattgctgctttccaggaaattaataaagttgccgtgtgtgatttgagtttccttgccgttttcatctttaatcgacggaaacgtaatatcggcgttatttaaaacactgaatgtattggaaggcgacgacagcgcttctgaggcttccgcaagcagggcctcttcttgttcgctcagcacgtgcggacgctgttttgtaatttcttcaattgcatgggagtaaagtttaagctcctctttttccagaataaactggtgcagcttgtcctcctgaatcgccagaatttccggttcaatgtaagcagtcgcgctggcagcctgagaatacaggcttgcggctttgtcgttcagcccttggtagaaagaatttcccgtatcctggtctgagcgcatatgtgcgtatgcataaagtttgccaaggcggttcgtcacttcatcctgtgccgtaagcgccgcgtataaattatcagccgaatgagcaagcgtgcctttaaaagaagataaattcgggattaattctttaactgcttgaaattctttattccaggcctcatcactaggaaaaatatcctctagtctccatgtatgctctgcctttacttcacttctgtcaggcagctgtgctgctttattttcctcagtcatggtgatccccctcgttttctttacttcaagccaattgaaaaaacgattgtttctccaaaaacttgtgttgtgattatcttccggcttttcactgccttttgtcaaatcatatgcggcatataagaccaagcataccaataatacagtgaaaaaacgaaaacaaactgcttgtacgcccctcacattcgccaccaccttgacgttagggtgaacgaaatgaagcattctcattccccaaaaaagagcagatcccgccggcgcagctcttctgccgtttgagggagcttccgttgagatgagggcatatatacttcattctcaatttcccttaaaaaatcctgcaagcataagaaatcagcatattgttttaccgccattctgataaggctatcttgtgaaccataccgcatccggatctccttacgcctgattttttgccgcaaatcatgaaccatgccggataatcggatcggcgcgccttttttagaaagttccgcaagccgcaagtataaatggctctgccacacaaaaacgggacttgcaaacacaaagcccgctgaaacgggaataaacacttcagaggggagaaatggaaatgcgacctgatgtctttcgtaaaaaagacgccggataagaccggcatcttcagataaaaaccgcccgcttttgtttcggaagccggctacggcacgtccccacgagggaagtctgacgctgtgccgcccttccggatgacatatgtctttcaggtttgctttatgaagagggattgtggttaagccggcataagaatagccggtgtaaaacggagtgatggaatgcagcctgtaaaaggagcgggcgtcgggacagtaaaacagtaaagaggaaaatgaatggacttcaaagaactgccagtgaaaagcagaaagccggaaaaattgcccggccatccgttttaaccgttttgccccgatgatccagaccggccggtacccggcgtttttcaggcctgccgtccggctctttaaagagtccgccgaaaggttcgcacattgaaattcaaaagccagcctctcttctccgctttccgccgtcaagtcaggccgctgtccagcggaagtcagatacggttccaggctgacgctgcacccttgtgtctttagccagagaaaaagctgcctttttccttccagatggtattcgctttcaggttcggattcccccggacacagcctgctttttttatgagcgaagtgcggcagtttctcccgtcccagtttgatatcaagttcactttcgcaaacggggcagaaccagcgtttctttctcagctcctccgctttttcctttgaatagcttccggccagctgaatgagccgtccgtcggcagtcacagcactgaacatgttgcatcttctcctttcctgaatcttgttgtattcagcaggaagaagatataatcctgtttgcggatgagagccgttatacggttttcagccgttcatcctgtcattcagaacaaaaaaaaccgatttctgctgagagaaatcggtttgttatgatgcaaagtgtttttttattgtatataacgcatgatcagcgatcaccaatttgccgtattcttcaagacggtgaatgctgactgatgattcgtgcgcgtactccaacaggatgcttagctgattttcaacctcttcatcagtttgctcataaaaatctgcatataaataatatcggtcttcaaacgaatacagggtcgttttgattccgttaagattcaattttgatagcgagatgagatcctcaaaatcatcgaaccgcaaagtgaactgaagcttttgctccttatcttcccggctctcggcctgctcttctttctggaaatcatcaagtaaagcatcgagattttcatctgccggctcttgttttttatcttccgggatcggcagttcgagtttttgtccgtccttggaaagctgggcttttgttacgattatttccagtcctttgtccaatgcctgaacctgaatccaaagaggaccctcgacagcgaattcctcttcatcatgcacttcatccatgacttcccagaacagttcttcactgcgctcgcgattgtaccagatttcttctctgtcaaaaccgcgatcttcaatatcaccataagacatataaaattttacagtatgctcattaattctttctatttccattttgccaaccttcccttctttataagatgttgaagggacatctaagctcccgatgaatagtactttactacactttacccattccgtccacatcttaaccttatagaagacagcgcaaattctttatatttctattttatgataaaacagttataaaagaaataaaaaagcattttcacaccgaaaaacaggctttctcccggttcccatcataaatagcgcaccgcttcatatattagctgtacaagcaatcgatctataagcgaggtgttaccatgccgcacgattacctgctgtcccttctgctcattatcggaattgaccttattctcggcggtgacaatgccgtcgtcatcgcgatggccagccggaatctggcccataaacaaagacagcaagcgatcatcttcggaacgtttatcgcagtcgtcttgagaatcgttctgacgagcgctgcggtctatttattgaatgttccttttttgcaatgcgcaggcggggtatttttattgtatctcggctatcagcttctgattgagaagaaagatgcgcagcatgtgaaaagcagttcttctctttggaaagccatccgcacaatcgttatggctgatatctttatgtcgcttgacaatgtcatcgcagtagccggcgcttctcacggtgagctgacacttgtagtgatcggtctcttcatctcggtgccgattatcatttggggcagcaagctcgttcatgccgccatggacaaaatgcctttattgatgtacgccggaagcggtcttctcgcatttaccggcggtgaaatgattgccggagacagcaagctgtcatttttcatggcagaacacggcattatacaaatgacgctgccgattttgaccgtcgtatttgttatcctcgccagtatgatttaccaacagactgaaaaataacaaaaagcccaaaccgcgatggttttgggctttttccatgcttatcgtaagcttatatcagttggcaagacgctgtgcttctcttaattggaaagaacgcacttttcttggcaggaatcgtctgatttcatcttcgttatagccgacttgcagacgtttttcatcaatgataatcggacggcggagcagtcccggatgctcattgatcaaagtatataagtcttgaagcggcatagattcaacatttacgttcagtttctggaatactttagaacgggtagagataatttcatccgtaccgtcttcagtcatacgcagaatctgcttgatctcatcaattgataacggctcggagaaaatgtttctctctacaaacggaatctcgtgctcttcaagccaagctcttgcttttctgcatgacgtacagctaggtgatgtgtataatgtaaccattaatcttcactcctctaattagtaggatgaacatgtttgtattctcaaattgaaatgactttaaaaaaggaatctttataggtattatactataaaaaagtaagtgtgaacagtctcctgagaaaaaaatgtgtcaatccggcaaatttacggctggcggatgtttccccattctcaattagctcagctgatcgaaaatgttttttcgttttttctcatcaatgactttgagaacttcatccgttttttcgtatgattctccgtaccatttttcatctttataagtgtgaatgttttcatatgtctgtttcattgcttcaaacatttcttcttctgattccgtcttaggtgaccagtacagaatctccattttgttcacttcattcgtagccaatgaccggcgccgatacccgattgactgcgcgtgcttgaaatgctctctttgataaaaacgcaagcgtttctgtgtatccgtgtcatcctcgtcaacaggctccacctcaagcagaatcggcttgtttttctttttcagcctgccgatcagcttgcttccgaggccttgtcctctggatttctttgacacaaacaggtaatcaataaagatgaaagagtcaaattccgcatacatcagcacgtggtactgcccctcttctttatgataaacatcgctttgctcctttaacagagcttccatatgcgcttttgatttcatttcttcaatcggaaaatattcactcagcttttcgtaccagttcattcatttgctccttatgggttcgttgtcttcacacttttagatataccccatttccgattgtttaaacaatcttacatctattaagacgtgtgatcctttaacatggtttcaatttttttaaaatggtgtgtaatcgacgtttttggtatagcggtttgccgcgtcccacaataaaaattcgtcaattccttcatcatgcagcgctttaacctggtcttccacctggcgttttccgtacttttgataatttccgctgccgagatatgatgccgtgaagtcctgaagccacggacgcgatacaggcgggtgtttcagcttagacagttttttatgttccaccttcgcgtattctttgacgactttgtaaggctcaagatccggtttatcaatgccgaaatagcttgtccaatggctcggataaatcatggatgaaatgacatcgacctgttctgaaattttgctgaaattctggccgataccaggcgcttccggcagcgtggctgaatagccgaaaatatcaaccgacacatccgcgccgtacggcttgagttttttcttcgcataaccgacaaaatcggtgacggcgtgaacacgtttttgcacattgctatctgctgtttttccgtaatcgccgtgaccgtatgtcagttcgtcatcacgtttttcaaatccttcaggaaaacggacataatcaaactgaatttcttgaaaacccatctttacggcttgttttgcaatctttacattgtaatcccatacttctttcataaacggattgacgaacgattcgccgcggccgtttttccagacacttccgtttttttctttaaaggaccactccggctttttgttcgcgagttcgctgtctttaaatacgacaatacgcgcgatcggatagatctttttttcctccagctttttcatcatcttttttgggtctttgatgtacggcttggcgattttggcatactcagaatggccgtccggcttaaaggtgaggtttccgttgtcgtccttgacatcaatcaccattgtattgagctccgttttgtccacaaagtctgtcagctctccgaatttgcttcctcccgctgaatgccctgtgacgtaaatgccccgcaccttatcaggatgtgaaaaatgcagccctgacggataagcgaaccgtgcatttgatttcggcagttctttttcggccagcgctatttttacaagcggctgctcctctttcgcagcggcgtgggccggataagcggctgcactgataaacagtcccgcacaaatggcgcacaaaatggttttcatactgatctccccctttttttccattatagaaaaacgggagcaggcttaataaacttgaatgtgcgcaaaaaaatcctccaagactgagtcttggaggatgatacgtttatagataggttttaaattcagcttcagtgcacataacaaaatgtcccggtttcacttctctgaattccatcttttctccgtcttgcagctgatgaatggacggatcgtatttctttcgcgtgcgatttctttcatagtccggatcagggagcgggatagcggacagcaatgatttcgtgtatgggtgaagcgggttttcgtaaagctcatccgccggcgcaagctccaccaattttccgaaatacatgacgccgatgcgatcgctgatgtatttgaccattgataaatcatgggcgataaacaggtaagtgagccctttttctttctgcaattctttcattaaattgacgacttgcgcctgaatggagacatcaagcgccgaaatcggttcgtccgcgatgataaactccggatcaaccgccagcgctctggcgattccgatacgctggcgctgtccgcccgaaaattcatgcgggtagcggttggcgtgctctttatttaaaccgaccgtttccagcagttcgtgaacccgctgcatccgctcttttttcgtttttgccaggcggtgaatatctattccctcggcaataatgtcggcgactgtcattctcggatttaaagatgcgtacggatcctggaaaatcatctgcattttccggttaaactccagcagcttcttgcgggattttttcccgtggacattttccccgttaaagagaacttccccgccggttgcctcatacagccggataatgctgcggcctgtcgttgatttaccgcagcctgattctccgacaaggccgagcgtttcgcctttataaatatcaaatgacaaatcatctacggcttttaccgttcctttctgcgtgaaaaaatgctgttttaagtgtttgatttcgagaagcttctcagtcatttttttcaccttccttcattaaaacaggatgctgatacgtattcggaagctgacggattttagccttcaccgcttcaggcggctcgaccttaggcgcatcaggatgcagaagccacgatttcacaaaatgcgtatcagacactttatacatcggcggttcctgttcaaagtcaattttcatcgcatatgagctgcggagcgcaaatgcatcccctttcggagggttcgtcagatcaggcggcgtgcccgggatggccgtcagtttttcctgatcggtgctgtccaggctaggcattgaggcaagcagcccccacgtatacggatggcgcggatcataaaagatttcatccaccgtgcccgattcgacgacctgacccgcgtacatgacagcgacccggtcggcgacattggcgacaacgccgagatcatgcgtgataaaaatgatagacgtatcaattttcttttgcagatctttcatcagctcaaggatctgtgcctgaatcgtcacatcaagagctgttgtcggttcatcggcaattaacagtttcggatttgccgcaagcgccatcgcgatgacgacacgctgtctcatcccgcctgaaaattcatgggggaattggccgatccttttttcgggcatcggaattccgacgagatcaagcagctctatggcgcgctttttcgcggcttcacttgagattttttcatgtttgaaaagcacttccgtaatttgtttgccgactctcatcgtcgggttcagagaggtcatcggatcttggaaaatcattccgatgtcctttcccctgatggcctgcatttctttttcagacatcggcacgatatcgcgtccgtcaaaaagaatctgtcctcttttaaagtagcccggcggcatcgggatcagcttcataatcgcttgggaggtcacactttttccggaacctgactcccccacgatcgcaagcgtctctcctttattcaaatggaaattcacgccgcggattgcctgtacctctccgccgtatgttttaaatgaaatggctaagtcttttacttctagcaaacgtgtcactcatatcactccttatttgcgtaacttaggatccagcgcgtctcttaacccgtcgccgacaacgttaaagccgaacatcgccaggcagataaagccggcagggaagaacagacgccaagggtaataggttaatgcaggcaatccgtctgaggccatcgttccccagctcgcaagcggcgcaggtacgccgaggcccaaataacttaaaaacgcttctgtaaaaatcgccgtcggaaccgtcagtgtcatcgttacgaggatagagcccatcgcgttcgggacgatatgcttaaacaaaagccggccggttttggcgccgagtgtctgtgaagcaagcacatactcctgattctttaattgcagcacctgtccgcggacgatcctcgccatattgatccagcccgtgatcgtcatggcgacgataatggtcagcaatcctttcggcaggacaaccatcagcaaaataaccattaataatgaaggaacagcccacagaatgtcggcgatgcgcatcatcacttcatctgtgcgtccgccgcggaatccggaaatgctgccccagattacgccgattaataaatcaagcacggcagctgcaacaccgataaagatagaaatccgcgcgcccacccatgtccggacgaatatatcccttccaaggtcatccgtgccgaaccaatgatctttcgacggcgctttatccgcatttaatagattggtagtggcataatcataccttgaaaagacaggcgcaaaaatcgccatcagaataataagaacgatcagtacgaacccgaccatcgcaagcttattgctgcggaagcggagcatggcgtctttccagagggaaaggctttttttatttattttttcggcatcgccggcattagctgaagctggttcaaacatatttttaggaatgttctgcatggtctaggctcctttctttgctttggaaagcttgattctcggatcgattaatccgtacagcacgtctacaattaatacgcataaaagcagaagcacgctgaagaacacggtaactcccataatgaccgtataatcacggtttgtaatgctgtttacaaaatgcgcgcctaaaccgggaattccgaaaatggattcaatgatgaaacttcccgttaaaatggatgccgccatcggccccatatatgtcacgaccggcaaaagcgcgtttcgaagcgcatggcgcacggtgactgacggacgggaaagtcctttagctgttgcagtccgtatgtaatcgctgtttaacacttcaatcatgcttgaacgggagagtctggcaatgaacgccatcggcatggaagcgagcgcaatagagggcagaaaggtgtatgcccaggattcccaccctgcgaccgggaacagttctaatttaattgagaaaatatattgcaaaatcgtcgccaatataaagctcggaactgagatcccaaagatcgttaaaatcgcaatggtataatcctgccatttattatggtacagggcagcaagcaccccgaaaagcacaccgaacgctaaagcgaggagaatagcttctgcaccgagagtgaatgagacggggaagcctgaattgattaaatcattaacactttggcctttatatttaaaagaaggtccgaagtcccacatcgctacagattttaagtagctgacatattgaacgaaaagaggcttgtccaggccatagtgttcgtttaagtttgcctcaatttcaggcggcagctttctttcgccggaaaatggtccgcccggcgctgcctgcattaagaagaatgtggcggtcacaatcacaaacagcgtgatgatcatgtaaatgaatcgtttaccgatatatttcagcaaggtgaacacctccatgttttttacaattttatacttaatcagtaagaaaggtatatggggacatcctccccatataccttgggtcttttgttttcagaaccgtcttttattcaaaagaagcatttctgaagtaaacttcgcctgttcctgtcaagatcacatttttgaggtttttatcctgcacccaaggatccgtatagaaataaactggcgcgaccggcattgcgtcaataaagatcttttctgcttttttcagctcttcgatacgtttatccggatccgtttcaagctgagattggttcagcagctttttaaactcaggatcttcccatccggtatcattgtttccgccttctttatcacggaacaattctaggaagttgatcggatcgttgaaatcgccgagccagcccatacgcccgatttggtagttctagctgtgcagcttgtcgatgtaaacattccattcggagttatcaagctcaactttgacgcccaagttctttttccacatttcctgtacggcctgcgcgattttcgcatgcgcgtcatccgtattgtaggacagtttgatcgccggaaggtcagaggcattcttgacgcctaattccttcagtcctttatttaagaattctttagctgatttgacgtcattgtctttgaaataaccttttgtgttatccttgaatcccttcattgacggcggcaccgcagccatggccgggatctgttcgccctgcgttacatttttcacgatggacgagcggtcgatcgcataagcaagggctttacggatgttgacattgttcagcggtttctcttctgtgttgaatttgtaccaatacacgcctgcgatcggttcaacgtgaagagatccgtcttttttcaatgtcggcagagattcagtcggaagctggccgagcggcattcctgcccagtcaagctcaccggcctggaattttttcagttcggtgttgttattgttaatcatcaccatgttgattttcttcaatttcacagcgtctttatcccaatattgatcgttcttttcgagcgtgatggaaccgctgtgtttccaggccgtcattttgaacgggccgtttgacacataattttcgcccgcatttgtgttccagtttttatgtttttccgcgattttcttgttgatcggcatatacgtatagaatgaagttaattgcgtgaaataaggtgtcgggttattcagttcaacctttaatgttttgtcatttacggcttttacgcctacatcatcaatctttccttttcctgtattggcagcttcagcgcctttgatgtagtagagctgataagcgtattgtgattcgttgttcgggtcaagcgcccatttccacgcatattcaaaatcctgcgccgtcacagggtcgccgttagaccatttcgcaccgtcacgaatcgtaaatgtataggtctttccgtctttgcttgtttcaattttagatgccattccttcttcaggctcacctttggagtttacgcgtgtcaatccttcaaaagtctggcggattacgcctcctgaaacggaatcattcgctaaaccaggatgcagtgagaacggctcggttttaatattgatattaagtgaagtctgtcctttggtgtcttttttaccgccgcctgatccgccgctgaatccgccgcacgcacttaatacaagcgagaagataagcatcaaacctacaatagaccaacgctttttcatgcactaaccccctaatcaaatttttcagcctttactactaaatactcagaaatatcagacaaaataacttaatatttttctaaactttaattgtgttccgtcttttctgattattttatgtaaagaagctgtaacaatagagtgaacaagttcattataatgaaatgaataatttattgcaatactattttctcaatttaaaatatttaaatttggtcagtttttctgtcaaaaaggtgatacacttctatagtttaaagcatgacctaactaaatttttttattgcaatttccagttcatattgctttttacatataatattcgttatacgaaatgttgatatgcgttatcatttaagcattttcagttctttttgaggattttcagcccttaagcaaactggaaataagcttgtattcctctgatgacatttggctataattgatttataatagatcaatcaaatacatttgttgtgattgcgatgatgaagagtagtacacattttcatccgtttgaagagagtctgcggtgctgggagcaggtaacgggcgatgtggaatggacttctgagcagctgaccgaacgttagtaggcccagccggagcagcctccgttaccaacgtctcgagcgattccattgtaatggaataatcagggtggcaccacggttcattcgtcccttttttctacgggaagaatgggctttttttattatgttttaagaaatgaggtaagaactatgaagaaaacgattttttctggcattcagccgagcggttccgttaccctcggcaactacatcggcgcaatgaagcaatttgttgatttgcagcatgactacaacggctacttctgtattgtcgatcagcatgcgattacggttccgcagaatcggcttgagctgcggaagaacatccgcaacctcgcggctctttacctggccgtcggacttgatcccgagaaagcgaccctctttatccagtcggaggttcccgctcatgcccaggcggggtggatgctccaatgcgtcgcatatatcggcgagcttgagcggatgacgcaatttaaagataagtcaaagggcaaagaagccgtcgtgtcaggactgttaacctatccgccgctgatggccggcgatattttactgtacggaacggatcttgttccggtcggagaagatcaaaaacagcatcttgaactgacccgcaacctggcggaacgcttcaataaaaaatacaatgacatcttcacgattcctgaggtgaaaattcctgaatcaggcgcgcgcatcatgtcactggctgatccgctcaaaaaaatgagcaaatcagatccgaaccaaaaggcatacatcacgctgcttgatgagccgaagcagctcgagaagaaaatcaagagcgccgtgactgattctgaaggcattgtaaagtatgataaagaaaacaaaccgggcgtttctaatcttttgacgatctattctattttaggaaacacatcaattgaagaattagaagctaaatatgaaggcaaagggtacggtgaattcaaaagcgatttagccgaagtcgttatcggcgcattgacaccgatccaagagcgctaccgtgaattaattgagagcgacgagcttgaccgcattctcgacgaaggagcggcgcgcgcaaacaaaacggccggcaaaatggtgaagaaaatggaaaacgccatgggtctcggacggaaaagaagataaagaaaagaggcgggagaatccccgcctcttttttagttcacttttgattcctgctccatttcccaaagcttttcgaaaaacggctgccctttaatcaaattttcacagaacgcaagatgtttatctgaccagccttcaattgtttcattgtaaagcatgtcccagatctcttcaaagctcatccgtttgatctgctcatacatatggggattccattccgtgtaccaatacacaatttccgcacggtttttcagccctttcagctggtcgagcgccataaacatcagctgcttgatctgccgctcttttctcgtcagccctctgacgtgctccggcgccaatgacaaaatgtgatattcctttgaagactccaattgcgccggctcaaattgaaacgattccggttctacatcctttaccatttcataaacaagctgctcctgtctcggaatcaggcggctctttctgaccggaatggtatacccgattgtatccacggcaatgatgccgatcccgtctgtcacgacaaaacaatactccagctttgtccgctcatgattttttcgcacgtatgacttttggtggacttggtcaagcagctctttcggaagctctgataagtcgttttctatgtaatgaaataataccgacggcactctgagcagcggcgtctgatccaaaagttcaaccgtgtcttccttccgccattcgtgaaaatggcatacattgtagccgttttcttccccttcaaaccaattgacccatacatcatgaagaaataacatattcgacccctcactttataaaaactgttgtccacagtataggcaagggatagataaattattccatttcgatatgagatttccgcaatacggaactggatttctgactgcatcgcaacaaaaaaatctcccgttccgtccgggagatcatttcacatttttcggatcaagcgcatcacgcagcccgtctccgacaaagttaaagcacaatacggtaagaaggatcaacaaacctgggaataacgggtaccaccaagcctgaatcataagcgtaaagttctgtgcatcctgaagcatattgccccagcttgcgatcggcggctgaatcccgaaaccgagataacttaatgtagattccgccaaaataaccgttcccacctttaatgtggctgaaacaataatcggtccgagcgcattcggcaatatatgagaaaagatgatgtgatgattttttgtaccgatcgtctttgcagctaatacaaactctctggaacgaagcgataaaaactcccctcggacaaggcgtgccgttgttgtccagcctgtaagggagaaaattaaaattaatttatccattccgggctgaaaaatcgtaacaagtgtaataagcaaaaatatatcaggtatggataatacgatatcaacggttctcatgagaacggcatcgacaatccctttaaaatatccggcaacggctccgacaactgtcccgattgtaatcgcgccgatcacagaagcgaatccgacaagcaaggagacgcgcgccccgtacagaaccctcgtaaagatgtctcttccgaatttatcagttcccattagatgttttaagctcggcggcttcaaacgattgataagagattgactctccggagagtaaggagcgattaccgaagcgaacaaggctgacaagatgatgatggttaatataacggctccgattacagctagtttattttgaaagaacttttcgaaaaaaatcttcgtcattgtttccggtttggattgaatattttcctttaattttacttcgctggggggtgtgccggtatttggctgtaacatttgacctctcacctctctttgttaatattcaatgcggggatcaaccagcgcatataagatgtccgcaattaaattccccaccacaaccaaaacagctgaaatgaccgtcatggccatgataaccggataatcccgcgaaaaggctgaatcaataaacaatttgccgagacccggccaagtaaaaatctgttctaccactaccgctcccccgataaatgacggtatcatcagaccaaaaatagtgatgacaggaagaagtccgtttctcaaaccgtgtttaaaaatcactttattatctcggaatcctttcgcacgcgccgttcgtatataatcctgttttaacacatcaagcatactggatcttgtgtatctcgttatccctgccatgtctgccgtggcgagcacaaaagcaggcagaatcaagtgatgcaatcggtcaaatatgttaaagtcagcattcaaagtgcttactccgccagtgggaaaccaccccagatttacagataaaaccatgattaaaatcaaaccgaaccaaaaattcggaatggcaagccctaaaaatgaagtaacagttatcccgtaatccaattttgaataaggacgtttcgctgacagaacaccaaatggaatagaaataagaagagcgacaagggttgagaaaagcataagcacaatcgtattcggtaagcgggataagataagttcagaaactggagtgcctttcttgacgatagaagtcccgaaatccccttgcagcatattccccagccatttcacatattgaacaggttccggatcattcaacccgtatttttcaatgaattttgccctgtccgcttgactgattgtagggtccatcataagtgacatcgggtctcccggcgctgctttcatgatggcaaacgacaaaattgtaatgcctaagagaatcggcaaggacattaatgttcgccgtaaaatatatgtaaccatgttcttgtcccctttttaaataggataagagaggaaaggaacctccttccctctccagggcttttgctatttttgatccagccaccatttttcaatattgtacaagtcatttttagggtggaatacatagccttgtaaattattcggcattgctctgtggtaattgtaatagaataagaagctgtacggctgatcttcagcaatcaatttgtatatctcttcatatttcttttggtattcttttctgtctgtaattgtcttcgcttcttcaagcagcttgtcgactttcgggtttttataccagatattattcagcccgtttttcgattggcttgaatggaagatagagaactgatccgggaacgttgcaagactccatccgagaagaagagcgtcataatcccaattaggggcacttgtctgttcgattaacgcactgaattcaacaattcgcggtttagcctcgattcccacttcttttaattgctgctgaacgacaacagctaaatcttcacgaattttattgccttgattcgttttaatttcaaatgagaatttttttccgtctttatcaaggtagccgtcaccgtcatggtcttcccatccggcttcttttagcagctgctttgcttttttcggattataatcaaatgtcggcactttagacttcggataattccatgacagcggactctcaggaacatccgctaccttaccgtctccgttcagcacttgatccaccattgcctgcctgtcaagagcgtaagtcaatgcctgacgcacttttttgtctttaaagatctcttttttctcattccagccgatatagctgtagtttaaaccaaggtcagatttgaccttcacatttccaaacgttttaaccgtatcaaaatctgtgcccggcacaacgaagaaatcaatatcccccgcttttaactgagccacagccgcgttagaatcaggtattgtttttactgtcactgtatcaaggtaaggtcttccgccaaagtaatcatcatttgcttccagtttgacatactcgccctttttccactcaacaaacttaaacggaccggagccgattggatttttacggttaaattcattctctcccagatctgcaaccggcaccttacccaatatatgttttggcaaaatgccgtaactgtcgagaacgacattatagaaataggcatcttttttcttcattttaaactgaatttcatattttccttttttcgttacggatttaagggactcaaaacccgagccacgctcaccgttgtaatccttgttaagagggatgctgtaggtgaaaacaacatcatcggccgtcagctcttttccatcatggaattttacgccttttttcagttttacatcatacgttaatcccccgtcagcttctgttactttttcagccagcgacggcttgacgtttaatttctcatcagtttccaataatgtgctgtaaagcattccttcaatatcagaacttgcaacatcagtagaataaagtggattaaaaagtgtgggttccccggttgacccgacaaccaaatctccgcctttttgcggttttcctgccggtttggattcggtgcttgtggattttgagccggagcaggctgacaggaagatggcaaacgccataaaaacacttagcatcatcagtgcgcttttacgtaatttcatatcaattccccctttgtgatatatatgcagcaaactggttatgtaatccggcataccccctctcgatgcttgtcatttcaggcatataaatggcaggcgacgtaatggccgggagcggcttcttcaaatgccgggatttgttccttgcagatcggtttggccatcgggcaccgcgtgtggaacacgcagcctttcggcgggtttgccgggcttggcagttctcctttcaggatgattcgttcccgcttgacggcgtctttttttctcgtgacgggcactgaagacaaaagcgcttgcgtataagggtgaagcggattgccgtacagctcgtgtttatcggtcagctccatcatttttcccagatacatgacgccgactctgtcgctgatatggcggacaacactcaaatcatgagaaataaacaaataggtcaggttgaattcatcctgcagttcttccatcagattgatgacctgggcctgaatggagacatcgagtgcggaaacgggttcatccgcaataatcagctcgggattcaacgtcagagcccgcgcaatcccgatccgctggcgctgccctccggaaaattcgtgcggatagcggtttgcaaagctcggatgaaggccgactttcgccagcagctcctccacccgctcgttccgctcgctcatgctgtacatatggtgagtctggaacggctctttaataatggaacgcagcgttttcctcgggttaagggatgcgaagggatcttggaagaccatctggatgtttttgcggacgctttttctcagcttttcttcagataagccggagatatcctgacccttaaatagaatccggccgtctgtcggcttgtataaacggatcatcgtccttcccgccgttgatttgccgcatcctgattcaccgacgatgccgagcgtctccccgcgcttcagtgaaaaagaaacaccgtcaacagcctttatatcaccgactttcctttgaaaaaaaccggagcggatcgggaaatatttttttacgtctttcagctctaaaatcgtttcttggcctgcagctgtcattttgattgggcaccctcttcctcatataaaaaacatcttacagaacggccgctttcatgcgttatcagctccggctgccctgttttacatttgtccatcgcttttgaacacctcggggcgaatcggcagccttccggaagattatccggtgtcgggacactgcctttgatcgcttttaatgtatcaatctctccatctatcaccggtatggagtttaacagcccttcggtatacggatgaagagggtttaaaaataagtcctccacactcgcgctctctacgacttgtccgcagtacatcacgatcaccctgtcggcggcttcggaaaccacacctaaatcgtgagtgatcagcagaatggaagtatcgaattttttgcagaggtctttcatcagctccaatacttgggcttgtatcgtcacatcaagcgccgtcgtcggctcatcagcgatcagaagcttcggattgcagctgagcgcaatggcgatcatcaccctctgtctcatccctccggaaagacggtgcggatattctttcatcacttgttccgctctggagaatccgacgagttccagaagctcaacggcttttttggacgcttctcttttattcatttttttatggtattcaagcacttcggtaatttgttcgccgatggtcagcaccggattcagggaagtcatgggctcctgaaagatcatagagacgtcatttccgcggattttgcaatattcgttttcggtgaaggaggccaggtccctgccttcaagcttaatcgagccgtccataatttttccgcccgagctttggacaagtcccataatagaaagcgaggtgatgcttttgcccgagccggattctcctacaagagcgacggtttcgcctttgttaatgtgaaaatcaaccccgtcgactgcggggatcggctgtttctttctgaaaaaataggtctttaaattattcacttctaatagtgtgctcatgatacgcccctttctcattccgctgaagcagagggaaacatacgtttcgctatcacaaaatatagaatagtcgaaaaattttatagttgtatattattacatcattattacaaaagcaagaattttttaggataaatgtaatatccttaaataatttccattcttttaatctattaaagcgttgcctccagaaaggtttttgaagggatggccaatgcttcttttactgttttttgatggtcggttaaatatttttttactatattgaatccgacggcatagccgagcattgaggggaagtatccttttccgtataacagctgggaaaacattctgctgtctctcgttaagcggaggttcggcttgactcttttttcaaacagaaaatcaagctgctcaggcgtatagtaggacgtccattccgccgtaagacttgagccgaaccgctcatatacagcatattctgccagcccctccatcatgattgtatcaagaaatgtctcgtctttttcgtcctttgtcacatgttctaaccggcagacgtgattatattcatgtgtcataagagcggatacagctgaattggaactatccgacgatagaaagaggaacattttgtcccgaaaggccagaccggattttgatccgaattcctgacggattttccggtttcgttcatcgacgggcaaaactacgatcggcacgtccggcccgttccacttctcctttaaataagcttcctccttttgaatatggctgtagcatcctttttctttcagccgtttactggtcctaacgccgtccttcaaatggcggaacatgccgtggttttgcagcatcccgagtattggcttccactctttcttatcggcccctgaaaaaagcggcaaaagatgcggggccagatcatttacggatgccgccttttccatccattgatatgtctgcttgacgctcataccggttcgcctcctcttgttgttatcatatgcacgcacaaaaaaaccggccacctttttcaggcagccggtcagaaactgtattattgatattttttaaagatcaaagtggcattatgtccgccgaagccgagcgagttgctgagaacgatgttgacatcctgctcgcgcgctttgtccggtacataatctaaatcacactcttcatcaggtgtttcgatgttaatcgtcggcgggataatgccgtctttaatggccatgacggagaagattgcttcaattcctccggcagcgcctaacaaatgacccgtcattgattttgtcgaactgacggcaagcttgtacgcatgatcaccgaaaacggtcttaatggcttttgtctcatatttatcattgtagtacgtgcttgtgccgtgagcgttgatgtaatcaatttcttcaggcttgatgcccgcatctttaattgcttcctgcatcgctctcgcaccgccttccccgtcttgggcaggcgcggtaatgtggtaggcgtcaccagttgagccgtagccgacaatttccccgtagattttcgcaccgcgggcaagcgcatgctcaagctcttcaagcacgacaatccccgcgccttctcccatgacaaagccgtcacggtttttatcaaacgggcggcttgccgtttttggatcaggatttgtagaaagggctttgtttgcgctgaagcccgcaaatgacattcttgtcagcggcgcttccgttccgcccgtaatcatcgcatcggcatcgccgcgctgaatgactttaaacgcgtcaccgatagagttcgttcccgtcgcacatgccgtcaccgtacaggagttgactccttttgctccgagagcgattgagatttggcctgtcgccatatccggaatcatcatcggaacaaagaacgggctgacccgtctcggccctttagtcaggaagatttcgaattgggattcaagcgtttcaagaccgccgattccggaccctacccaaacgccgactctcggcgcgatctcgtctgtgatgttcagaccggcatcttgaacggccattttcgcggctacgacagcgtattgcgtgaagcggtccatttttcgcgcttcttttttatccatgtgattttcaatattgaaatctttcagttcagcagctactttcgccggatactcgtccgattccacacgtgtgatcggtccgattccggatacgccgccgattgcatttttccagcttgtttcggcgtcgtttccaagcggagacagggctccaagccctgtaacgactactctttttttactcatcttgtgtgcacctcacctttttttatcgtccccagcgtattgctatggcgccccatgtcaatcctccgccgaaaccgaccatgacgatgacgtcgccgtctttaattttgcctgcttccagttcctctactaatgaaatcggaatggatgctgcggatgtgtttccatatttatggactgttttagacatcttttcaaccggaagctccaaacgttcccgtgccgcttccatgatgcggatgtttgcctgatgcggaatcaaaaagtctacgtcctctttggagaggccggctttttcaatgacatttacactcgattcacccatttgccggacggcgaatttgaatacttctcttccatgcatgattgtatgccctttttcatctaagtacaagtgctgaccgcctgtaccgtctgctccgagctcaaatgacagtatgcctctgtcgtcgctgaccggtccgatgaccgccgctccggctccgtctccgaacagcacagccgtattgcggtcgtcccagtcggtaatgcttgagagcttttccacgccgaccacgaggacatgtttgtatgtttgcgattcaatgaattgtttggcggttacgataccgtacataaaacccgcacatgcggcgctgatatccatcgcgcacgcttttttggccccgagcttctcttgtatcatacaggaaacggtagggaaggactggtcaggagtaaccgtcgccacgaggatcatatcaagctcctcagcggaaatgccggcctgatcaagcgctttttgcgcagcctcagcggccatgccggatgaatacatatcttccgcggcgattcttctttcttctatacctgttctcgtacgaatccactcgtccgatgtatctaccatttgttcaagatcatgatttgtcagcactttttccgggatgtaacggccgacgccaagaattccagctttcattggaaagactccttttttataatgaatttaaaactaattagttatgatcaattattagtatcaggtactaattctaccctattttttttctgttggcaatatattcgtctaaactatcggacgctgctcctcatagaataaaaggaagacgaaaggaggcttcactatggatattttctccaaaatgatgttcggcgattccagagaccgggataaagaaccggaagaaaacccggagcagcctcaggctgaaaacgaagaagagatcgattacaaccacgtgatgaatcagctggggtccatcatgaactctctggatcaattaaagcccgtatttaaaaactttgcgccgatggtgtccgctataaagaaaaaaatcatgtgaaaagccacttcatgaaaagtggctctctttatttattcagctccccggcatcagatctgccaagctcatacgcttccgccatgaccgatgtaaacaggtccataaacggctgaatcatttccatagacagatctatgccggatttctcaagctctgcctttgcttccggcaggtatttcatcgcgatctgcataaattcaagagacttttcatgctgcatgtgtatccacctctattcatttgacggcagttcatttgttcggttatacgtttttacaaggtctgagattttgtcttgaaatgctttgtccaccagagggctgaacgtccccatttcaacgactccttccctgaaatcaaagttgtgatctccgctcttgagcgtacctttattatattgctcggcaattaatgtataggctttatctacgttttgcaccgtgcttgtcagcaccgtgtttttgccgagattcgattgctcggcgacatagccgatggcgtaaagcccgtcttttttgatttgctgaatgacaggaacattatacccgtctccggccggatatacaacatccgtgccttccgcttttaacttctcgtaaagatgcagcgcttcattgccgttatcccagtggtccgtaaattcagtattgacggtgatatcaggcttttcatatttcgcccctttgataaagccgtctacttcaggctgccacaaaaaggaggcgatgacgccgacctcattggtttttgacatatgggcggctgtcattcccccgaaaaaacccattgcttctcccataagatgaacgcttgtgacattatcgcttttcgccgttccgtttgcgacgacgaattccatgtcgggataatccttgctgatcatattgaagatttcctcgtattcatttccgtgcccgtataaaagattgactccttttttatgaaaatcatctatcgcttttaaaatatcttcatcggatctgatattttctttataataaacgtcaacgttaaattcagattgtatcgctaataaacctttgtaaccttttgtgccccataccaagtcactgatggtatcgggaaaaagcattccgaccttctcaatttttcctttaaacggagtttgtgcgcatccgctcaataaaaggaggacagaaaagatcatgacaagcctggtgatcaagccatgttcaaccccttttcaaactcataacatatataattgatatacgtttattgtagcggtaatgcacataacatggaaggtatttcttaaaaaatgtcgaatattgatgaaaattgtcttttccattctttaattttttcttccgcttcctttttttgcgttttttcttttatttccagggtaataatctgattttcgtcttctgtgccgtatgcctcaagctgattcatcagcccgcagactgcgtcttctaaaaagatcctgctttcgccatcttcttttgcttctgtccacggaccgtaaaggggaggaaggataatcgcttttgccgtatcccgctgaccgtttttttcccagtctccgtgatcctcactgtaaacaatccaatataaaggctcagccctttcttcaggcagacacccgctcccgtattgaacgcagatacgatcgtattccttttcaccgatttcatctattatttgaaaaagcccgtttctcgcgagccacattaatcgttcttctaaatacagctgcctcgttttgtcctccggttctgccaaaatgacatcaacatgcacgccctcatccatcaaccgttcgcacaatgaaaggccgagaaattcgtctgctccaatgatcagcgctgtcttcatcacatctgccgcctttccggtttttcattcgcacacaagccaaacagccctctgaaaagagatggctgttgtattctattcattacaggtctttttcatgactgcggaaaaaccggcagatggctctgtacatacgcgcagggttctcaagcaggtgatacgtgatatcagtcttgcttccggtcttttcccgggcttctttatacgcattcgcatgcagggtgtacgggtacggcgctccggtcgttctttgccatatatgtaccggcacgcgggtgcggcagccggtaatggtctgatagctcagtgagcttgcctctttttcagaaacaccgaagctctgtgccgtttccctcagaaactgcttataaaaaaacttattttctttctctgattcaaaatgggcttgaaggtcaagacaaggatctaacattgcggctgaacggatatgctccgctgaagactgcagcaattgatcggcgataagggcgcccatgccttctgcgagcaagtgtattttcggattgagggtttcttgtttaagcacataatgcatcagctgtctggcgtaaaggacggctttttccgaaccccaatgccgtccgtataaattgctgttaaaaatggtgtaccctctgtcaagcatcgtatttaacagctggtttctcccttcatgttcgagccaaaagcttgagtcccggctgacaaagtgggttttgtcccccagaataaagatacagaagccgttcggccgatacggcagatggatgacgttcagctcagatccgaattggaaaaatctttccgtaatccccatgcctgcccgcctccttttactcctaatctctctattggctatcatatgtaagaagaatgaaaacggatcggataaactcctatttgctgctatgttttggctattatcccgagcacaggaaccgaattttccatcagacggccggacaggcgggcaatgtcagtttcaggcgcgctttttgatgagaaaatgaccttccgcccgcgctttatgtatggtatgatacaacgtagaataaaatgaaggacgaggtggaaacgtgcggtttattatcggttttatttggacgttccttttaacacatatggcctgttatttggtcgcctccatgaacagcgcggcgtacaatttcaagcaatcatccgttattgccgtggttattgcggtgctagtctttgttcttgcggagatcatgcctgtcaaacaggatgcaagccagcattaaataaaaaaacctgctattcagcaggtttttttgtgttcacggttttcgttgatacgtccacaatctgttgtggtttgaagtttcagggaacatttctcccactgtaagcttgattttttgcgggtttttgaccatgcttcccgtttcgccgatttcaacgtacacaccgttattcggcgctttttgtcccgggcggaattgatgctgctgtcccacgtcatttcctcctttttcttttttatgtagtatgcgcttgtatgcggagaaatatcaaaaaccgctgaatgagattcagcggtttttttgttcatcctgtttgtaaagaagagctttcaggagcgctttttgcgcgtgaagccggttttccgcctgctgaaataccgcagagttcgggccgtcgataatctcggacgtgacctcttcttcccgatgcgcgggcaggcaatgcaaaaatgtatagtcgggtttggcgagactgacgagtgaggcgttgacttgatacggggcaaacacattcagccgctgctgcgtctcttcctcctgccccatgctcgtgaagacgtcggagtaaatcacgtctgcatcccgcaccgcttcctgcggattttcggtaagggtgattttcgctccggaaacagccgccgcttcttttgcggcatttaccgcctcttcctctacttcatagcctttcggcgaagcaatcgcaatgtcacagcccatttttgcgcagccgatcattagtgaatgcgctacattatttccgtcaccgatataggcggcttttactcctttcagttttcctcttatttcttgtatcgttaacagatccgcgagtgcctgacacgggtgataccggtcggtcagcccgtttatgacgggaatgtctgcatgctcggcaagctcttcgactttttcatgctcaaaggtgcggatcataatggcatcaacgaagccggacagcaccttcgccgtatccgcgaccgtctccccccgcccaagctgcaggtcgctgcttgaaagaaatagtcccgttcccccgagctgggccattcccgcttcaaaagacacacgtgtgcgggttgaagatttttcaaaaatcatcgccaatgttttcccttggaaaatcggctgtatcggatgttgttttaataatgaagcttctgtcagaagcgcattgatgtctgacgggctgacatcttttaaggaaagaaaatctttgccgtacaaatgggttaatgtgtgttccgcttttattgtgtgcatgatgccacttccttttgataaagatctttgagcgatacaggctgaggtttgccggagccgcttgctaaaaatgcctttacggtttccggttcagtaaagaccgtcacaccgtgcgtcatggcttcaatccgttgtttacgcgcttcttcagagtgattgaaattgatatggaccgctttatcctttcgctctgcccatgccgggaacgcatctttgcataccgtaaatcccgcctcttgagcctgacgttccaattccgcatcacagccttccagatagatgctgccttttttctcccagacgtgcgcgtagatttttttcagggcgctttctgcgtcaaacgcgacacacatgccttctccggtcgacttcatttccggcccgggctttacgtccacatcctgaatggcgtgcgaagaaaaaaccgggaatttcactgccgttccgtgctgattttgaacctcgggcttgatgtctttaagggaagcgccggccagcaatctggcggcaagcgggatcatcggcacccccatcaccttagacacgacaggaaccgtgcggcttgcccgcggattcacttcaagaacgagaatatcccctttgtcatcaatgacaaactgaatgttcatgatgcctttaaaagccagttttaccgcgattttttcggcggcctcttttatattccgctgcatatcaggtgtgacagacggacccggaagaatcgcaaaactgtcacccgaatggacgccggcgcgttcaatgtgctctgtgtaagtcggcacaaatacttcatgtccgtcggaaatcagatcgatctccaattcttttcctgtaatgtactgatcgatcaaaatcggatacggcatgctcgcttcatttgccagcagctctgacatttgcgcttctgaatcaacgatgatcatgcccatcccaccgatgacataagacggacggatcagcacggggtagcgaattcggcttgctttttccgttgcttcttcttttgaataagcggtttcgcctttggcatgtttcaggtcaaggtcatcaagcagctgataaaacagatcccgatcctccagcgcatcaagggtttcaaaggatgttccgagcagcggaatgcccgctttttccagcggttcagcggcattgatcgcggtctgtcccccaaattggacgatggcaaaatcaatgttttcatgttccgccacgttcaaaatatgttctgtcgtcagcggttcaaaataaagccggtcggcgatttcataatccgtgcttactgtttccggattgttattgatcataatcgtttcataccccagcttttgcagggtcagaacgccgtggacggcgctgtaatcaaattccactccctgaccgatgcggatcgggcctgagccgatgatgagggcgcgttttttctcttttcggctgatatctccgtcgctttccccgaggtaggtggagtagaaataattcgtcttggcatcaaattcagcggcacatgtatctacgattttaaacgacgggacgatgcctgatttctttctgagagcacggatgtcttcttccgtttttcccgtgagagatgcgatcatgacatccgtgaagccctttaccttcgcctgctttaaaagcgggaaagacagatgatccccttcttccatcagcttgttttccaatgtgatgatatttcggaatacatggagaaaaaacgggtcaattttcgttttggcatggatgtcttctatcgtttcaccgcggcttaacagctccatgacgacgaaaaatctccggtcatccggcgttaccgctaattcccacagctgattgatcgtacagccgccgagttcaggcaggcgggtgccgatcgttttcagctcaagggaggccgccgctttttgaatggccgcttccatatttctttcaatcgccatgacctctcccgtcgctttcatcttcgttccgagcgtgcggtcggcatgtttaaatttatcaaacggccagcgcgggaatttgacgatgacataatcaagcgccggttcaaagcttgcataagtagagcccgtcagcggatttttcagttcatcaagcgtatagccgacggcaagttttgccgccattttggcaatcggatagccggtcgcttttgacgcgagagctgaagagcggctgacacgcgggttcacttcaatgacatagtactgtttgctgaacggatccagcgcaaattgaatgttgcagcctccgaccacatccagcgccgaaataatcgccaggcttgctgaacgcagcatctgatattcttcatccgttaacgtctgggacggtgcgacgacgatggagtcccctgtatgcacgccgacgggatcgatgttttccatattgcagacggtgatgcatgtatgattgctgtcgcgcatgacctcatattcgatttctttaaatccggcgatgcttttttcgacgaggcattggctgatcgggcttgctaacagcgcctgtttaataagcgtctgaaacgcttctttcgttttcgcgattccgcctccctttccgcctaacgtgtacgccggtctcagaatgaccggaaatccgatagactcagcgaaacggagggcgtcttcttcgttgtcgacgatttcgctttccggaacgggctgatcaagctctttcatcagggcgcggaactgctcccggtcttcgcctttttgaatggtttccaccgatgttcccaaaagcttgacgtgatgcttcttcagcacgcctgcttcttcaagcttaacggctaaattcaatgccgtctggccgcccaaattggcaagcagaccgtccggtttttctttttcaataatggcctcgatgctgtcggttgtgagcggttcaaaatatatttcatcggcaaacgcctcatccgtcataatcgttgccgggttgttgttgactagaataacgcggtatccttcttctttcagagccatgcagccctgcgttcctgaataatcaaattctgccgcctggccgatgatgatggggccggagccgatgactaatatgctggaaatggttgtatctttaggcatgagcgatttctctccttgctggtatcactttctctagaaattcatcaaatatccactcgctctcagccggtccgggatgagcttcagggtggaactggacgcttaatacgggaaggcgcttatgaatgagcccttccactgatgtatcattgacatgatgaaatctgatggacagctcgttttcgtcaattgatgcttcatcaacgacatagctgtggttctggcttgtcataaacacccgtttcgttttccggtctatgacgggatggttggcacccctgtggccgaacggcagcttatacgtatttcctccgaaagccagggcaatcagctgatgcccgaggcaaatgccgagtgcggggaaatcactgagtaatgatgtaatccggttcatgtacggcgcaatcgctttcgggtcgcccgggccgtttgagagcacgattccgtcgggctgaatgtcgtaaacagcgttcatctgctgatacggaatgaccgttactttacagccgcgctttacaagtgacgaggcgattgattttttataaccgaaatcaatcagcgcaatatgccggtctccattccccattgacgtgatgtcttcagactgcgccagctccgccgggttttctgttccggatgctgccggaatttctcctgttgttgacacggcagcgttcatcgtgccgccggagcggatggttttgacgacggcccgtgtgtccacttcggttaagagcgggatgttccatttatttaaatactctctcaagcttgagactgcttcatggtgagaaaaatgttcacacgcttcatagacggcaacagccttgacttgaggaatcttactttcaaggtctttttcattaattccgtagtttccgatcagcggatacgtaaagacgatgatctgacccttatatgacgggtctgtaagcacttcctgatagcccgtcattccggtgaaaaaaaccgcttcgccaacacagcgggcttctttttcaagttcaccgccaaatgatgttccgtcttccaatactaaatagcctttcatctaaagcccacctcttgatgaataattaattaaaaatatgaatttttatacttttatatcgaaaaaaattaccgtttcactgccgaatgcgcttcgatcgctgccttcagcatactgacggccgacagcatttcttcttcagaaaccgtaagcggcgggagcagcctgatgacattcggtccggccggaagcacgagaagcccgcgttcctgcagatctccgatgatgccggacacgggacctgcgcattcaatgccgattaataacccttttccgcggatttcttttacaaaaggccctgtcagttcacggttcagctgcgcttttaaaaatgatcctttgtctgccgccgcctggagaaagtccggctgaaacacaatatccaaggttgctttcacagctgccatggcaagcttattgccgccgaaagtcgtaccatgcgtacccggcgtaaaggcgtcgccaagcttctttttgccgatcacggctccgacgggaaaaccgtttccaagccctttcgcagcagtgatgatgtccggagagatgccgaaatgctcatagccgaatgccttgcccgtccggccgattccggtttgaatctcgtctgcgataagcagcgcctgtttgtctttgcaaaatgtctgtaaggcttcgatgaattccggatcggcgggattgactcccccttctccctgcaccgtctcaagcatgacggcggcgatatcatcctcttttgaaagcgtgctgaatgccgacggatcattgaacggaagatagtgaaagccttgaagcatcggtccgaaaccggtcttgattttgtcttgtccggtggcggccatccccgcataggtccgcccgtgaaaggattgatgaaatgttacaatttttgtctttcccgttgctttacgggcaagcttaatggcgccttcattcgcttcggccccgctgttgcagaagaaaacgagatctcccgcgctatgttcggcaagctttgccgcggctttttcctgaagatcattttcaaacagattggaaacgtgccatacgctgtcaagctgttctttcactgcttctgtgacctcatcatgacaatggccgagattggaaacggcgatgccctgaataaaatcgagatacgtttttccgttttcatcctctgcaattgtccctttcgcttttttgatatcgatgggccagcggctgtaggtttgaaatagactgctcatgacacgctctccttttctttgacgatttttgttccttggaaggcttgatcggtgaaaaacgctccttttccgtttacgatcatcacttcctcgacatcttcactcagtgccgataatgccgagtttaccttcggaatcatccctcctgaaatcacgccgtcatctatgagggcctgaatctcttgcggcgtcaaagtatccagcctgctctctccgtccataattccttcgacatccgtgacaaataaaagtttgtcggcgtgtaaggctgaagcgacggccgatgccgcggcgtctgcgttgacgttcagcgtttcgaaatcacttgtcatggaaagcggagcgataacgggaatgatgccttctttcattaatgcgtgaatgattgacggatcggttttttgtatttcgccgacttctccgtatttgtcttgattaagataggatgcttgaaggagaccgccgtcctttcctgatattcccgcggctttcagcccgtttttcgcgagttcggttacgaaaaatttattgatcgtccctgacaagaccatttccgctgtttccagcaccggtttggtcgttttccgctgtccatcgacaaattccgtttcaatctgcaatgttttcagcatttttgaaatgtccgggccgcctccatggacgacggcaatgttccagcccgattgcataagctcttttacattttgaaaaaaatcggcggataactctcggattacgcttccgccgcacttaaaaacgatcgttttcttcatgccgctcccctttgttatgtgcgatagctcgcattgattttaatataatcataggttaagtcacagccccatgcccggccgctgccggagccttcctgcaggcggactgcaatcgtaatctcatcacctgataagtactccttggcatcagtttccgaaaacggctgaggttcgttgtgtttaaacagacactggccgccgaggaaaacttccacttgttcggccgttacgcttgccgcactgtgcccgattgcgccgatgatgcgcccccaattggcgtctgtgccgtaaacggcggtcttcacaaggcttgagccgacgatttttttggcgataatattcgcctcaaggttgtttttcgcgccttcgactctggcttcaattaatttcgtcgctccttcaccgtctctggctatatctttggcaaggtcttcgcatacaagctttaatccctttttaaaagccggccagtcagggtgctgctccgtcaggcaatcattccccgcgcagccgtttgccatcacaagcaccatgtcattcgtcgatgtttctccgtcaacggtgatttggttaaatgaaacatccgtaatctctctaagcgcgtttttgagcgcctgttcttccacggccgcgtccgttgtgacaaagccgagcattgtcgccatgttggggtggatcatgccggagcctttcgccgctccgccgatcgtgatgatgtctccgccgatcaccagttcataacacgtctgtttcgtcactgtatccgtcgtcaaaatggcttcttcaaatgctccggatacggacggcgcttgaccgagctgttcaatgcccgcttgaatttttttcatgtctaaaagctcgccgatcaccccggttgacgaaaccgcaacaagctccggctcaatgccgagctggctcgcgaagccgtcccgcatttcataggcgtcctttaatccttggtctcccgtacaggcgttggcaatcgcgctgttgacgataaccgcctgaagcacaccctcttttttcaggctggcttgcgtcactttcagcggcgctgcctgaaaatggctctgcgtatataccgctgcactgactgcaggcgcttcgctgataatcgctccgagatctttttttgaatagcgcagaccgcagtgcacgccctttgcctcaaatcctttcggcgaggatacgccgccttttattttcgtgatttcctcactcagctgaatcatatttttgaatccctctttcgttctatggatagactggcgtcatcgtaagtcccgtttcttcctgccagccattcatgatatttaaattttgaaccgcctgccctgcggcgcctttcatcagattatctatgacagaaacgatggtggcacggtttgttctttcatccacagtgacactgatatcacaaaaattgctgccgtatacctctttcgtcgccggaaattcaccttccggcctgattctgacaaaatatgaatctttgtagaattcggaatacaattctcttacctgtgcagcagacatacccggaggagcctccgtatacatcgtcgccataatgccccttgtcatcggcgccaaatgagcggaaaacgtgatcgggcctgtgccgggctgccaagccgctaattgctgttcaatttccggagtatgctgatgctcattaaccttataaattttgaaattatcattcagctcagaataatgagtgcccatggatgcttttcggccggcgccggatacgcccgttttcgcatcaacaatcagaaatgaatcttgtaaaagcttattcttcgccagcggggcgagcccgagcagcacagccgtcggaaaacatcccggattggcaatcagctttgcagtctgaatctcttctttttgcagttcagctaaaccgtaaaccgcgctttgaatcgttcctttcggagcggccttccgcttataccacttttcatacacggccgggttttgaatgcgcagatcgccggatagatcaatgaccgggatgcccgcctccgccagcttgggcgaccactctccggaaacgccgggcggcgcggctatgaacatgacatcaatttcgtttcggatcgtttctatatgaagcggccgaagtgattgtgacgctatattcctcaaatgcggatatgaagcggcatattcttttccttcgtcgctcgatgaatataatatacaatcttctgcataagggtgatggttaagaatcctgacaagttcggcgcctccataaccagtcgcgcctataatacctattttcaacgggttcaccttcttggtttttgtgaaattatttaacattataacatgaataaaaattaattcaattgtatatttaatattttttcattcattttccatctgttttcgctgacaaaaaaccccctctcgatcgaggggggcataagaaaaacaggctgatcggatcagcctgtttttttcagcatcatcagcccgcttataaaaaacagcacggagctggcgtaaaagataatataaaccgtaaagaaatcagcgagaaacccgccgagaataatggcggcagctgaaaatacggccgtccagaaatgatagctgccgactttttttccccgctccccgccgtcggtgtaatcggcgatcatgattttctcgccgtgtttttgcatcgcgccgaacaggcccaaaagcacctgcacaacataaacctggtgcacgccggtaatgtgcgggagcgtcagaagaagcaccgccatcccccacgaatttgccataaggaaccagcgggaatccagtcttgccgacagccggccgagcagcggatgaatcaatgcgccgctcaagccgaacaagccgtatgagagaccgaattgcgtgtagctggaaccgatgtttttaataaataaaatataaaacggaaagatcaggctgccggcaaaaaagacactgctctgagacaggatcagccattttaaatggttgtgtttcatgatttgtacctctgataaaaataattcataaacaagtcatccggatcatatttgtgttttttctgaaagaacatatcgcttttcggatatgcctcgcgcatctgctctttcgtttgatacagcatatacgggagataataactgccgcggtggcgcaatgccgtatccgtcatttttctgacaatccgcgccgcactcgcctggctgtctgttgaaaacccttcattgattaaaagaacgagtgaaaacatgtcttcctttgcgtatgacagatcggctttttcatttttttgcacatagcggatcgtaatatttacgagattgagatcttcatgtgacagcgtcttgcgtaaatcatgaatgtacggcgcaaattcgccgactggcacgaagtattcttgcagcacatcggtgttgtctgtgttttcatattccaaaaatttcgattctgaccgcatgacattgttcctggagactttcacgccgttttggctgagaaaataagactgctgggttgaccagaaccaatttctgccccagtcataccggcgggagaggccgagcgcgaatttcgtcagcgccggatgctcatcttctttcagttcattgtgccgctttaattctttctggttgtctgagagtgtgtaatcagtcacatacatatcgtgcaaaaagcctttatcccctgttgcgatccgcgcgagatgcatgcgcacggcggggttgcgccgaacatgctgcgtaaaatattgactgtatgtatcagcgttcatgcgtttcgttttcatttcataaagctcatcatccgtcagctcaatatccgcgtcaaggatgacgccgaacaggccgtagccgccgatgacggctgaaaacaggtcatctttcggagtaacggtgatgactttgccgtccgcctttaaaagatgaaacgatttgaccgtatcaatcagcgaaccgtaccggatatcccggccgtgggcgttggcgctcagtgagccgccgatcgtaaaaatgttttgcgattgcatgacttttaccgcgagcccgtatggattgacatagcgctgaatatcattccacgtcgctcccgtctgcaccctgatgatttttttctttcggtcgagaccgagtattttgttgtagcccgtcatgtcgagaacgataccgtcttcataatacgtctggccgcccattgagtgctgggcgcctgcgattgagatcttcagatgctttctctttgcttccttaatggtttcgaccaatgtttctttctcttttcctttgaccgtctgcttaattttcacgggcatgagacggctgacatccgtcattgtccctgcctgctgcaccggctctttgtgaaaagcggaaacagcgaacagcgccgtataaacaagaatgctaaggataatgagaagtagttttttcttcatggattcctccctcgcatgcagccggtctattatatcatgcctcacgtccgtttttttcctttttaacccgataccgcaaaaaaccccgaatggtgggaaactcgggtttttttagtgacttgcccttctttccgcacgccggtctgcagcggcaaagcagacagaacggcgcccgacagaatcatgtttagtacagctcgaaacggtcagccggaaaacaccgggcataaaaatccacagaaatccttaaaatgattttttagtcagtatataatcgatatatatgcagatgtattaccagagggattgtttcaaacaaacatgttaaatgaggtggagaaaataaacataaaaggaatcaatcatcttcttttttctgtttcaaatttggaaaaatctatagaattttatgaaaaagtatttcatgcacagctcctggttaaaggacaaaagacagcatattttgatctgaacgggctttggcttgcacttaacttagaggcggatataccaagaaatgaaatacataaatcttatacgcatatggcctttacaattgacccaaaagattttgatgcaatacatcaaaggttaaaaaatctaaatgtaaatatattaaatgggcgtcctagggataagcaagatcaaaagtcaatttattttactgatcccgatggacataaatttgaattccacacaggtacactccaagacagactgtcctattacaaaaaagataaacctcatatgaaattttatatttaaaggtttgtttgcgatccaaaacaaaccctcactgtcgcttatccgcgttgattttttccttgtaaatgcagacaaaagaaaagcacctccaaactttaggatgtacctaaaatccgaggtgcattttcttattactgaatccctaatgcgatttttgcgtagcgtgacattttgtctcttgtccaaggcggattccagacgatgtggacctccgtctcttttacatccggaatgtcggcgagcgcttttttcacctcgtcgacgatgatcggagcgagcgggcaccccattgatgtcagtgtcatcgtaacgtgcgtgaggccgtcgtcatccatatcaacgtcgtatacaaggccgagattgacgatatcgacgccgagctcagggtcaacaacctgctccaaggcgcccatgatgttttcttttaatgcttcttccacgttccatcactcctttttcctcagtataacgtaaaagcggcttttgttaacacctttgtgctttataaatgcttatcgaaccaggcgacggtttctaaaacggcgtatctcgggactttatgatcagcccgttcgtctttcagaaactgaagatggtcgggccggctgctgtaatgaggtttaatcgtttcataaaagccgcgggtcggtgcatacggaacgactttgtcttgaacgccgtgccagaacagcagcgggcggctgcggagtttttccggttccagactgagatcgaacggtttgagccgcgcaaacagttcatcgacctgttcttttgtgacgtcaatgtcgatgtcctgcttttgaatgtggtcaatctgctgctgaaaaaacgccgtatagttcgggcttcccatcagactgacgccggctttgacccaatcatacgcggccatcgcgccgaatgtcgtaattccgcccattgacgtgcccgcaagaccgatccgcccgtcttcaatcagaccgcgcgcttcaaaatcctttttcagcacgtcaagctcctcaatttcatttaatacaatgtcccaaaaatggacggcgagctcttctgctgacagctgttcagcgcgttcaccgtggtaaagagcttccggcagcaccgccctgaagcccttttcagcaagcaggtaagcgaaatgaagattatgctccttcgcgcttgtaaaaccgtggataaagaaaacaaggggagcgggacggtcccgattttcttcttttacaatatgtaaaaacggaatgcctgatacggtttgatgatcaataagaatcacgttgactccctccttaggataaccataatcataagtgtaacatgtagacaataaagatggtaaaaagctacactgtacataagtgaaaaacagcaaattatatgacaaaaggagttatttatggagacaaaaccttatctcatcgccttagatctggatggaactttattaaaagacgataaaaccatttcccctgaaacggcacggacaattcagaagctgaaagaagcgggccatcatgtctgcatctcaaccgggcgccctttccgttccagttcgatgtattatgacgagcttgggctgacaacgccgattgtcaattttaacggggcatttgtccaccacccgaaagacgaatcatggggacgctaccacacgtctttatcggtcgatgtggtcagacagcttgccgaacttacagagacctatcaaatacataatgtgctcgctgaggtcattgacgatgtgtacttccattatcatgatgagcatttaattgaggcgtttcatatgaatacggcgaatgtcacattcggcgatctgcgtgaaacggtcaaggaggatgtaacgtccgtattgattcatgcaaaggaagaggacgtcgcggatatacgcgcacatttatccgatgtgcacgccgaggtcattgaccacagaagatgggcggctccgtggcatgtgattgaaatcattaaacacgggatgaataaagcggtcggcctgaagaaaatcagcgactattaccaagtgccgagagaacggatcatcgcgttcggcgacgaagacaacgatcttgaaatgctccggtttgccgggtgcggcgtagcgatgggaaacggcacggatgaagtcaaacaggccgccgaccgcgtcacgggatcaaatgaagcggacggaatcgccgaatttttaaaatcctatttctccctgtgaggttttgccgctcataacacaaagccttccgcccatactaaaacagacgactcatctcgtctaaatatggaagggggacattgcaatgggtaaacgaaacaaatcaaaacggtttattcagcaaggcaaggactctgtcagtcttcatgacgcaagatttccatatcggtctacattagaggaagcacagcatgatgcagcaaaagattcggctgaaaggcaggttgacttttaatgagaaacgaactgttttctcaagccaagtcatttgtccagcaggccgtcatgattgctaacggtttcgaggacggcgatcaggaaaaagctgtctcacgcgccaaaaacgccgtgtcttccgcgtacgccaattcgacggatgcagaacgtcagcagctgcaccaatttcaggatcagctggagaaattgcaataaaaaaaagcgccccgtttagagggactgccccccgtttttgagacaggggtcaaaacaccttttaaacagccaattgccgatagtttatcggtgattggttgtttagtttggtttgaatacgaatattgttataataatgaatgtattctatgacagtgcgttctacgatggcagtcgtagttcgatcaatgctgttaagatagaacgtttcagactttagcgaggaatgaaacgattcgatggaggcattatcagcgggcgtccctttgcgggacatgctcatggtaatgccttttgttttaacagctttttgatactcgtaagatgtatacacagaaccttggtcactatgtaacacgcagttctcaggcagcattggtagctgatcaagtgtgtctaagacaaaggctgtgtcctgcttatccccaatagtaaaagcaatcacttctccattgtataaatctaatatactggaaaggtacaattgtttctgtccataaggcaaatatgtgatgtccgttactagtttttcaagaggacgatcagactgaaagttccgatccaatatattatcgaccacggcatatggctgcccatccttcttgcgctttttcaccttaacccgacactgccattgatttttctgcataatacgttgaaccgttttatggttaatacacattctcttttttagtatggctgtgatttttcgatatccatatcgatacttgtgctctcggcacaacgtgccgatttgtttttccaaatggcgcttgggatgatccttcatcagattcttcttccaacgataataagacgctcgagagatacctaaatgaatacagatatcctgtacggtcattgtgctgtgcaatatttctacaagttcgactgacgtttcgctatcaacttcctttccaattcgttgtacttttttaaaacttcattctgttgtctcaggtaacgaatctctgcctgcagtttctctaaatcggaagaatactccggaccttttccgtaagtgtattgctttccaacaggctgttcgaatcgatgtgtatcaccagccttataccatctaacccatgtctgaacctgtgtcttattcttaatattcaactcctgcaggatctctttcataggtacgcctgccaatctcatttctacagccttctgtttcacttcaaccggataactcactcttgtccccatagaaaaaacacctccaagtctaatttcggataacaatcatccgtattcaaactcgaaggtgtttttatttgtctcatcttatggggtcagtccctagacgagggcgccgcttttttatttcacttcaaatgtttttaccgttttcagtctttttccgatctgatcggacttccctaaaaacgtcaccgtcaccgtgtatgttcccggaccgggcacgttcttccacacatctgaaaagtcatacgtttcattcggcattaaggtcacagtctgaaacgcctgagtaaacattttgtcttttgaatagcggtacagttctttgtgatgttggtcatgtacggtcaattcgaatttctgccctgagctgaatgtgaaatcgatcgggctgccgctcttgttttttaaagacatttgaaattcgatctgctgatccgtctgcacagggtttacggctaattccgcttgctgttcattcatctctccggatacctcctcagcgggctccttctgcccggattgactgctgcatccgatcaataaaatgaccggtaataacaggccaaacagccacttcattctatccgctcctatcagtcttttctgaagaaaccaaagatccccgtcgtttgcacgatgtttgtgaaggctttcgggtcgacttctttcacgattttctcaaggtcatacaattcgtaccgcgtgatgacgatgatcatcatttctttctgttcgtttgtgtaagcgccttttgccggcaccgtcgtaatgccgcggaccatttccccgtaaatcgcttctttgatttcatcggctttttttgtaacgatcatggcggtcagtttcatgtggcgggtgtgaatggcgtcaatcacccttgttgtgacatacagagcgacaagggtatataatgctttctcccatccttgcaataatcctgccgtcaaaatgataatcccgttcaaaatgaagaaatatgtgccgaccggcttatccttccatttggccagcaccatcgacacgatatcaagaccgcctgtcgaagcgccgaatttcagcgttaaaccgatgccgatcgctgagatgactcctccgaatacggtattcagaagaatatcgtgcgacagtctcatttccgggagaattcccataaagacggacgtcagcgctacgcttaatatgctgtatacagtgaatgatctgccgactttcagccaccctaacacaccgatgggaatgtttaagaggaacatgagaactcctgtcgaaatataaaagggggcgtattgatcaacgacgcttgacagcagctgggcgacaccggtaaaaccgctggcatatacattcgccggtatcaggaataaattcagtcccgccgcatacagaaacgcgccgatgacgacgattgctaatttttttgcttgttctagtaccatggcttgctcctccgctcattttcattattagcttttcccttaaaataaagttttgaacactattttgccacatttatatgatatagttggcatcactctcaccaatcggaaagaagggaattatgatgacagttcaccttattgctgacagcgcctctgacctgccgaaatcttatattgaagaaaaccggatcgggttcattccgctgcacgtaacacttgacggaaacgaatatgaggacacggtcaccattcaggcggatcatatatttcaagcgatgcgggacgggaaagttccgaaaacatcccaggcatcaccggatacgataaaaaaagtatttttacaatacgcggaactgggagaaccggcgatatacatcgccttttcctcaggtctttccggcacctatcagacggcggtgatgatcgccaatgaagtaaaagaggaatttcccgattttgatttacggattgtagattccaaatgcgcttcattgggctgcggccttgcggtgatgcacgcgcaaacactctgtgttaacgggaatacaatacaagaaatcgaaacgtctgtaaagagcttttgcgcacggatgaaacatatatttacggtcgatgatgtcgcttatctcgcgcggggcggcagaatttcaaaaacgtccgcttttgtcggggggcttttgaacattaaaccgattctgcatgtggatgacggcaggctcgtgccgctcgaaaaattacgcggacaaaagaaactgtttaaacggattatagaaatgatgaaggaagaaggcggcgattgggcggatcaaaccgtggggatcagctatgcagataacgaggagacggcgcttcggatgaaggaaatgattgaagaagcgttccatccgaaagagaccattcttcattcaatcggctctgcgatcggcgcgcactccgggccgggcacgctcgcgatttttttcctgaagccataatttcaatgcgggcgggcatcctaacggacagaagggaggctttgccgcatgaaagatgatgacaaaaaaccgttggacaataacgccgtaaatcagaaaaagaaccggcttgccgaaaaaaaccggcaggcgggaaaaaaccagaattccaaaaaaccggaccatctgtaaaagcaaaacagccctcttgtgtatgaagagagagggctgttttttgttctatatgcgtctaacatcacttatcacgaatccgctttcaggcaatgccggcattctggacaggctgaagctcaaatcttgggacggaacatcgtactctatttcattggcaagaaacgcaagggaagttttcatgacttccacggtcattccctcacccggacagcggtggccgttagccggatcacctccgccctggggaatgaaatcaaatttattttcctcccgcccctgaaaacgttccgggcgaaattcattgggattttcccaaagccgggaatcatggtttgtcccatataggtcaagcatgacggatgcaccctttttaaactcacagttcttccatacgaaatcttttttcacaacggctcctaaaaacggggcaaacgggtaataccgccgaacttcatgtgcaaatctttcggcctcctgatcatctctcgatctcagtttgccccgatattcagggtaatcatgcaatgcaagagctgaaaacgtaatgaagtaagaaatggcggcaatcgggcgcagaacattaataagctcaacagcagccatgtgagaatcaagtctgttcccgtcaagttctgtatgaaaagccatttcatacaaggctgagcactccggcgtttgcagcttgccggaccgcacatcctcaatgacctcctctatccatttctccgttttcagcctcgcccttctgcctttccaatgacgcggtccgacagcgccgaatgcgtctaccatatcggtgaaatcctccgcccgctctttcacttctgagtctttcagcgggacgccggcccactcacaggcagcccggcacagcactttcttcgcttcatcaaaaaggacaattcggtttgaaccctcccacatttccgcagatgctttccactgttttgccaccgcttccgcaagccgtttttgccggggcggtgtcaacagcgacataaatagaagcttcctgtgcttatgccgttcaccgtccattgactggattgcccctgttccgaataacgttttctgcacccgtttggggagggcatgctcccgctgaaatcgttctgtgtcataaaaaagctttgcggcttccgctccgctcatacaaatgaatgtcttccctaataaacgggcgcgaaacacatccgagcgataattctccgctcggtttttcacaaatacataaccatcgcgtaataaagccagactattatcaagacccttttcatgcggaatttgttcatccatcccgattcctcccttcttttttcacctttctcgaaaaagaataaataacacaagtatattcagtatttgtgtttcattcagaagttactcatgtcaggctgcaaaaatcagggggcggggcaaaagcccgttacaaagtaaaccggcggacctgatcgtttaaccgctctgtcaggctcaccagattattgacgctttccgccattttatgaaaagaagacagctgctcaagcgcggaggcagaaatctcttcgcttcccgcagccgtttcctgaacgacggcgctgatgctttcggcatgatgcagcacttgctcaccaagctgtttcgattcgacgatccgtccgtccaattgagtaagctccgctttaatatgggcggctttttgttcaatatggacgaatgattctgacgttttctccatcagctcctgctgtctgtccgctaaagcgacgccggtcgtgacagctccggtaatagatgtgatgccgtcttcaatttgctttaccatatcgaaaatctgcgcggtcgctttggctgatccgtctgcgagcttccgtatctcctcggcaacgacggcaaatccttttccggcctcgcctgctctggccgcctcgattgcggcgtttaatgacagcagattggtctggcccgcaatgtcagaaacggtctgcgccatcatactgatgcctgccgcatgctctatgaagagatcggcggcttcggaaatctcttttgatgtctcattgcttttatcaatggcttgcttggtctcggctaaagcaccgcgccccgcagccaccgccgcaatcgtctcttcgctgcttctcgtcgtttgttttgaacgttcggcgttcgcctttgaatgttcatccatttgttcaatgaattgcaccgcatgctgcagatcttctgaaatggtttgggagccttgcgccatttcttccgtcgacacggacacctgctcggtcatgtccttcagcgtctggttttccttcgtcaaaccttccgcgaaagtctcgacttcacggccgacctctccgatcgcctgaattaaggtgcggagctgttcagccatcattccgaatgagtcattcagctctttcagttcgtccttccctttataatcaagcatttcaacagcaaggttccctcctgcaatacgacgggcattttcagccatgcggcggatcggccctgcaattctcttcgtcagcctgatggaagatatgacggtgacggcaagtatcacgatggtcagcacggctgcgctgtaaacgataaactgaatctggtcagccgtctgcttctgcatgtcttcatagtgatcccggcttttcagattcagcatataaatatcattcagaagaccgttgatgcgggccgccgtccttgtcgcttcagccgggcttttcgaatcaagagcagcgtccgcctccgcctgccatgattcgtattttttggcgagtttgtcataagcagctttgtctgcaccgtccgtcatcgtttttttgagcgccgccagtttgtctgagctgcttttcatatagcttcgcacatcttctttctgggcgtctgcgagcgtataggaatagccggtgatgctttcttttaacgtattaaggtcagcttttgcttcctggacgtttaacagcgcgtccacttcatcttcatttgaagcctgaatcttcatcatgtttacaatggtaaagccgatgacggcggtgaagcaaatcatcgtaacggctgcgttaacgagcagccttgtccgtaatgtcacttcagatcgcctcctttttcaatcaggctgtttttcatatccgtgatctttttcgccagcccgcctgcgtttttgacaactctgatcttagctaagtccatgccgttttccttcagtccgtaaacgatctcaccgcttttgatctccttgttgtctgttaaatctttcgccaattcatagatgacatggtcgacgtttttcactaaagaagagataacggcgtgctcggcggtgtaatattgatcgctgtcaacaccgatggcgtatactttttgcgcctccgcttctttcagtgcgccgacgcccgtgaagccggccgccgtaaacaggacatcggctttttttcggatcatgttttgggcgatgcgctttccgagcttatcatcatcaaacgtaccgctgatgtccgacagcacgcggattttcggtttgactgattctgcgcctttcagatagcctttcttaaaccgtttaatgacgtcggcatctgaaccgccgataaatccgatcgtgccggttttgctcgtcatggccgccagcgctccggctaagaagcttccttcatcctctttaaacgtgacggaggtgacattatccagtcctgatacggaatcaatcagcacaaaccgctgcttcggatattttttggcgaccttttctaaatccgcctgcatgctgtaaccgagccccaccacaagatcattgccttcacggacaagctgggtcagtcctttttcgtatgtaccggtgtcttttatctcccggtaatcaaatgtgatgccgagctcgtctctcgctttcatcaaaccttgaaagcctgaatcattaaatgattggtcgccgaggccgttgtctgtcagcatgatgccgattgttttcgttttttcggccgccgtttcctcagatttgccggcacatcccgccgtgctgagcgcaatcagcagtacagccgcaaatatcgccatttttctcattgaaactctccttttgttttttttctatagttatatatcggttcggatgtcagaatattttatttcaataaaatatgtatgttcggcaggatgttaaacaaatgagggtataggagcttttgagaaaataaaaaacatcggttttggttcaccgatgtttttgcagaaaatttattgtttttcgtatgtccagccgtcttcctgatagaccttgccgtttttcatcagatgcccgagcgcccgcttaaaggcggctttgcttaaatgaaaccgttcgcggatatcgtcaggatggcttttgtctccgtaaggcatcgcgccgtttcttgatctcagataggtcagaatctcttccgcgtcaaccgaaagcgcatcctgctttctcggcagcagtgacatgttgacggagccgtcttccttcacctcgatgacacgccctgtcacgcggctgccgagtctcggctcttcttttctttctgaagggtgaataaacgcgcggatgccttcatcggtaatcagaaaagagcctgatgcaatcagtctgtacaccgtgcccgtcaggtctttattcatgacgtcttcctctgcatccgtaaataattcactgatgatatcttcgggtgccggcttggcaaacatgcgcccgcggcttgtcaccttcagcatgcaatacagtctgtctcctttttgcggccagacggatttgtacggaggcaggtgctccgttgcgacgagcgcgtcttttgacagaccgacgtcgacgaatacgcccatatcttccacagcgtccgtcacttccacccatccgtagtcataaaagctgatgagcggctttttcatcgtcgccgcgagtctttcctgatgatcgacgtaaataaatacgtccacttcatctctgtcttcgatatcctctgtgatttcactgttatgtaaaagaaccgtatcctcgccgtcggttaaaaaataaccgaaatcggtttggtgatctatactaagcgtgagctgctgccctggtctcatgttatcgtccttcctgattcgcccgtatgaggctgatgtttttctcattttttccaatatgcataaattcatgctttatgctgttggacatttctctttattctactataatcaactcataagtgaaatgttataggaggttttctcatggcaaaagaaagttcttttgatattgtatccaaagttgaatttcctgaagtgcagaatgcgattcagatgacgctgaaagaaatcggcacgcgctatgactttaaaggatcgaaaagcgatgtaactttagaaaaggaagagcttgtcctgatttctgatgacgagtttaaactgaatcagctcaaagatgtgctgagcggcaagctgatcaaacgggacgtgccgacgaaaaacattgaatacggcaaaatcgaaaatgcatcggggggcacggtgcgccagcgcgcgaagcttgtacagggcattgataaagacaacgccaaaaaaatcaacgcggtgattaaaaactccggcttgaaggtcaagtcgcagattcaggacgaccaagtgcgcgtcaccggaaaaaataaagatgatctgcagcagattattgcagccgtccgcggagcagacctgccgattgacgttcaatttattaattttagataaattatgtgattcctattgattattgtctctattttcggtaaatttggagaaagggattttcacagttaagttttggaaacccatgacaattacatgaacgttcttatcaagagaagccgagggactggcccgacgacgcttcagcaaccggtgtagtggtttacccaaaccatgaccaaggtgctaaatccagcaagctaaaaacagcttggaagataagaagagagacaaatgattacaaagtcttcttcttaagaagactttttttatttctcttttttccttgctgaatgtgacgaaggaggcaaacaatgggactattacaagacttaaaagaacggattttaatcggagacggtgcgatgggcactctcctctattcctacggcattgacagatgttttgaggaactgaacgtatcaaagcccgaagaaatcaagcggatacataaggcttacgtggaagccggggcagacatcatccagacaaatacgtacggcgcaaattttattaagctctcaagatacggacttgaggatgaaacgaaaaaaatcaatcaggaggcggtcagaatcgcgcgtgcttcctcagacggcgcttatgtattgggaacgatgggcggcatccgcacctttaacaaaaacgcctacagcctggaggagattaaacgcagctttcgggagcagctttatttattgctgcatgaagagccggacggtctgcttctggaaacatactatgatttagaagaggcgcgcgaagtgctgaagatcgcgagaaaagaaacggaacttccgattatgctgaacgtatccatgcacgaacagggcgtgctgcaggacggaacgccgcttcgggaagccctcaggtccattgccgatctcggcgctgacataacgggaatcaattgccggctcggcccgtaccacatgattgaagcgctcaccgaagtgccgattttccgtgacgcttatttatcggtctatccgaacagcagccttccgtctttagaagaaggccggcttgtttatgatacggacgatgcctatttccgggagagcgccgtacagttccgcactcagggcgcgcgcattatcggcggctgctgcggtacgacgccaaaccatatcagagccatggctgaagcggtccgcggactttctcctgtcactgataaagaagtgaaaatcagacgggaagaagaagtcatctcagtccgcaacgaacggaccgagccgggtttaaacgaaatcgccgctcaaaaacggtcaattatcgtagagcttgatccgccgaaaaaattgaattttgacaaatttctgcaagcggcggctgaattaaaagaaaccggcatagaagcgctgacgctcgccgacaattcattggcgacaccgcggatcagcaatgccgcctgcggttcattgctgaaagagcgccttgatatccgttctctcgttcacattacatgcagagaccgcaacatcatcggccttcagtcacatttaatggggctggatacgctcggactcaccgacattttagccatcacgggcgatccttcaaaaatcggcgactttccgggggctacctccgtctatgatttaacgtcctttgacttgatcaggctgattaaacaattcaacgagggcatttctttatcagggaaaccgctcggcaagaaaacgaacttttccgtagccggagcatttaatccgaatgtccgccaccttgataaagcagtaaaacggctggagaaaaaaatcgagtgcggagctgactacttcgtgtcccagcctgtctactcggagcagcagctcattgacattcatcatgaaacgaaacatctcaaaacacctgtgtatatcggaatcatgccgttaacgagcagccgcaacgcagagttcatccatcatgaaatcccgggcattaagctgtcagacagcatccgcgaaaaaatggcgctcgccggcgaagacaagcggaagcagaaagccgaaggcctcgccatcgccaagtcgcttctcgacacggcgtgcgaactgtttaacggaatttatttaatcaccccgtttctccgttctgatttgacgtcagagcttgcagcttatattaagcaaaaggatgaaaagcgggctgatgtatatttgcattgacgcggaagaggccgcctgatatgacaggcggctttttcatggtacgatacagaaaaagaatcaggcaaaggaggattttttcatggttgaagtaaaacccatcaccgcagaagacacgtacgcgatcagacacagcgtgctgcgcccccatcagacgattgaggattgtaaatatgatcaggacagcgtcaaaggagcctttcatctcggaggtttttacgacgggacattgatcagcatcgcttctttctacccgcagaaccagcaggcgttacaggcagcgcccgcctaccagctgcgcggcatggcgacgcttgaggaataccggacgcaaaaagcgggaagcacgttaatcgcctatgcagaacgaaaactggcagatatgggggcggcgcttgtctggtgcaacgccagatgtcacgtaaagggatattacgaaaagctgggctggaaaagcacgggcagcccctttgacatacccggcatcggccctcatgtgatcatgtataaagaactcgcctgaaacagacaaatgcccttggggacatgtctctaagggcattaccctgaatgtcacgtctgcttttatatacggtactattgacgcccttccgcttttttaataccctttgtacattacacaacagcaaggatggcaggcagaaaacgatatctgtcaattgccgttttcagctattaattcagaagaaaaggaagtatgagatgaatacgatccaaaaaccgaaaatcccgaaagaattgccggtgctttctttcacagaagcgcttcaggacgacctcataaaagaagtcgtcatagaaaacgccgtcgtaaacagcaaactggacggcctgcgcgccgaaaaagtcattttcagaaacaccgtttttacggatgtctctttcagacatatggaatgtacggatgtcctgtttgacaaatgtgatgtctcaaacgctgatttcagcggaagcatcatccatagaacggcgtttcagcattcaaaacttctcgggttgaatctggcggattccgccatgcgtcatgtacggtttgaagactgcctcgcaaattacagctccttcagctattccaatatgaagcatgtccggtttgacacgtgcgctcttacagaaagcgagtggaatgatgccgttcttgaatacacagatcttgacgtctgtgatttgaacggcgcaaacttcatcggcacgtctctttttaatatggatatcagcacgtgcacatttgatcatctgcacgtctcacttgagaagctgaaaggatgccgcatctctccgtctcatgccgtgacattcgcagaagcgctcggagccattgtgacgtgattttttattaaatgaaacggcggtcggcatcctgaataaatgctcggcattggtgatgtggggtgctgctttttattttgcggcgcttttgtttcgataaaaggaattcggccaggccatgttgaatgtaccggaagaagagggggaattggaatgtcagacattttaaagctgtatcactaccacagatgggcaaatgagcaagttattcagcatctgaagacgctgcccgcggtcagcttacagcagaaactgaaaagtgtttttccgactgtgaacgccgtgcttgtgcatatataccgggctgattacatttggcttcacgtgctttacggagaaactttcgaacaaatcgcctcgcagtttgatcaatttgaaaagcttgacggagattttgaggcgattgaacatagaatgactgaactggacaaagaattcagcgaatttttaaaagaaatggagaacccggaaggtccgatctctatttctcatccgcgcctggggacgcttcagacgacatatgccgatgtgatccggcatgttgtgaatcacggcacataccatcgcggcaatatcaccgcgatgcttcaccaaatgggctataaaggcgtgccgactgactacatttttttctcatacgaatcataaaaaagcaaaggcctcccgggcctttgcttttttacttcgaatctatcataatccgatatagccggagacgcccgctttttcggccacatcgtaaattgtcattttcatgcttactgatccctcttttgttctctggttttaggtcagtccgttttccggcttacgaatttgcggtattcaagcggcgaaatgccttcaatctgtttaaacagtttggaaaaataggttgggtcctccataccgatggcgtccgcgatcgcccccattttgtcattggttgcggacaaaagacgtttcgcctccgtcattctgactttgttcgtatactggccgggcgtgacgccgagcacctgctgcatacagcgggtcacgtagtcttggttgtaatgaagagccgaagagagcgctttgatggttgttttctcctgatagtgctcctgcaggtaccgggcggcctcccatgcgactctttcctttgcggacgggatttggaacgcttctttctgaagatggagcagcagctcttcaaacagaatctgctttctgagcggcagatcggagttctcggcgctgacatctgtcaggacactgaattgcccggccataaactgcgggcgtctcactttccctttttgcggcagggacagccggtagcgggacggctcttcaaagctccctttttttcgcctcagctccgaccagttgttcccggttgtttccgccatctcataagccgctccctcaaaatgaagccacgaataggatgtcgtttcttcactgccttttgtcccgtaatgttcaagcccgggagaaagcagaatatattctcccgcttcaacggaaaaggcgttttcgtcttctgtaatgtagaggacgccttctttcacatacagcagatcaaacaccgggaagacccgtctcacatgggtttcgccttttttgaacactccatctcccgcagcgataaagaccgggaacggaggaactgtgaactcgagaaaggacatattttcggccctcctttttaagtcggatttttgcaagaagtttcgtttctctccctttttattataagaaaatggaggtacacttttaaacgttgattttgtcaggaaaggggttaaaagaaatgaaacaagcgattttaaaacgggctgcgttcaaacaatcctctgatcacaaactctcattatacgcgctgacttggccgatatttattgaggtttcattatatatgtttatgggaaacgccgacactcttatgcttagccaatactctgacaacagtgtggcggccgtgggtgtcagcaatcagattttaaatttaattatcgtgatgttcagctttatcgcaacgggtacgacaattgtgatttcacagtttttaggatctaaacagaaaaaagaggcgcaggaagtggcttatgtatcaataggagcgaactttgtcatcagtctcgccatcagcgccgccatattttttgcggccgttccgctgcttcatgtgatgggtctttccaatgaattgatgccggatgccaaagtctttttgcaggtggtcggcgggctgtccttcattcaggctttgattatgacgttcagcgccattttaaaaagctacggtcatacgaaggatacgatgttcgttacgatcgggatgaatattttaaatattgccggaaactttcttgtcattttcgggccgctcggccttccggtgttaggcgtcgccggtgttgcgatgtcaacgtccttcgcgcggatcatcgggctgatcgcgatgattgtgatcgtcaaaaaacgcatcggactcggtctgacatggcaaaagatttttcacgtccataaagagcacttgcggaaactcctgaaaatcgggattccgtctgccggcgaacagctgtcttacaacatttcgcaaatggttgtcacttattttatcgccattatgggcgctcaggcgcttacaacaaaggtttatacacaaaacatcaccatgtttatcctgctgttcggaacggcgatcagccagggcacacagattttgatcggcagatatatcggcgccaaacggtttgacgacgcttatgaccgctgcatgaaaagtctgtactgggcgcttggcattgccgctttgacatcagtgatcatgactttgttttcaaagcagctgatcggaattttcacaagcagccctgacattattgcgacggcgagcatgctgatcgccatgacgatcattcttgagcccggccgttcattcaatgtcattatcatcaactcgctgcgggctgccggagatgcaaaatttcccgtctacatggcgatgatttccatgtggggtatcggactgccgctcgcttatctgttcggcattcatttcggattagggcttatgggcatctggatttcatttatcgcggatgaatgggtcagaggcattcttatgtacagaagatggcggtcgcggatttggattcaaaaagggattgcatagacgccctggcttcgttatgaagccgggcgtttttttatgcttgtgaaagctgttttctcatgtcaccgagctctgaccggtaatgtgccgctaaaccggtaacggcgggccttgagtataacggaaacagctccagctcttcagacgcctcctcgaaatacgcctcggcctcgaatgcgatgtactcccatacattcataaaagctttgttgacggtatggctctccagctcttcttccgtatagccgaattgcttcatcacctggcgcgggagacgctttttcgcccgctcgtccgtatggacctccagaagcatccgggtcagctgaatggctgctcctaatgaaacggctgcatggcggagtttctcttggttccggcgcgcacaaaccggcagcagcagcaggccgagggctccgcctgtttggcccgcgtacatcagcaggtcatcaaactcttgatacgttactttttctctgtcagagatttggccggcgataaactcacgtaacggctcttcttcaagcgcaaattgctgccgcacatcggtgagcgcctcccacaaaaagccgtcggcgcgggacccgttcagaaagtcttgtgccgcctgttcaaatcctccaagttcctgcacatcaagccggtcagcttcgtgaaacaaagcaagcaccgcccatgcggcccgcctgttttttggcggcagggatgagaaagtccgtttatataaaggaaagtgcgcctcggcaagctgggcgcatgtttcgtattcggtcatggtatcactcctctgttttttagtgtaccatatgtttcacaataaaaagaccgatatccttcagcggaaaccggtcgcggcactgttattcttctatatcgatacggtacgcctcaaaccatgtatggatctgggcaagatgggcgatcagctgcgggcctttcatcagctggccgaaccacggaacctgaaaagatgaaccttctgtctccagcagcatttccagcttctttctgtcaagcagggtgtgaagcacggaatctttctgttgtaaaatcgttttcagccattctgtgaccccctgcgtgtatttcgggtgatgcgttttcggataagggctttttttgcggtacaaaatatcttcaggaagcagtccttcaagcgcttttcgcaagatgcctttttcccggctgccatgcattttcatttcccaaggaatattccaaacgtattccacaagtctgtggtcggcgaacggcacccgtacttcaagacttgcgcccatgctcatgcggtctttgcggtcgagcagatttgtcataaaccaaagcatatttaagtagaacagctgccgtctcgctttatctgttcccgtctcaccgtctaacagcggcgtttccgcaatggtttcttcatatctcgcattcacgtattctctaagattcagccgtttttgccacttttcatccaagagcgtgatcctctcctcagtcgatctcatccaaggaaatccgtcttcttctgccgcggtgtgaaaccacggatatccgccgaaaatttcgtccgcgcattctccggaaaggctcacgacaaaatcttttttaatttcccggcagaaccataatagcgaggaatcaacatcagccatgcccggcaggtctctgacgagaacggattcctccagatgttcaaccagctgatcctgcgtaatcacgcacttatgatgctgtgtaccgaatgcatttgtcattttatcgatccacgggccgtcatcattcggctgaaaggcgctcgctttaaaaaatttgctgttctcctcataatcaattgaataagtatgaaggggatctctgccttgtttctcaaaatgagcggcggctatcgcggttatcgcgctcgaatcaagcccccctgataaaaacgtgcaaaccggcacgtcagatacgagctggcgtgtcactgcatcctgaaataagtaccgaatgtgagccgcggtttcatcgaagctgtctgtatgcttttcgctctttacattccaataacgccatatggacaaaccgtcctttgagaaagtgaacgcatgggcgggacgcacctcgtgaattcctttaaacaccccgcagcccggagttctggacggcccgagtccgaatacttccgcaagtccgccgctgtctgtgcgggctttcacatcaggatgagcaaggatggctttcaattccgacccaaacagaaaggaagagccgtgttctttataaaaaaacggtttgacgccgagccggtctcttgccccgaacagccgcttgcgcttttcatcccagatggcaaaagcgaaaataccgttcaagcggtccacgcactcctcccgccactcaatatagctgtgcagcagcacttctgtatcagaggtcctctcaaaacggtggcccctcgcctgaagctccttccgcaattcctccgtgttatacagctcgccattataaatgatggtgtacgtttcctcttgatgcgtgcaggccatcggctggcggccgccttcaatgtcaacgaccgaaagtcttttatgtccgaataaaacatggggctctccccagacgtttgaatcatcaggtcctcgttttgaaagagtgtctatcatattattcataatatgtttctcttggacgagctgcttttgaaaatcgacccaacccgcaattccacacatgtgatatcagctccaatcccgtttctgtcggtatcaaattcgtttctatcagcactttacccagtttatgcaaagaaacgcagatagttgatttgtcccactaagagttgtatgagacaagcccgatttggaaagaacggaagagaagaaacaaacaaaggagaccggcacggttatgaaacgaaaacagcttttctcagaaaaaaacaaatgggggcgcggcaccctgatgatagaggacggcatctgcctcgtcgaaaacgatgaaggcgatatcctgctggcagacagtctaggaaacgcagacgtattgatgaaacgcggcggcagatggcagccggcacggatttgcggcggtgcggccgaaatcggcgcagacaccatccccctgctcggcggggaagaaatccgttatgaaaaggcagtcaaacggccgctgttaaccttgctcgattcgctggacgatgaaacgtttctgctgtttctcagccatcttcacgggttcggcctgtctgtatatgattgcgtattttcctacaatcaggcgctgttttccggtgaaggcgtttcgttttatcacttctcggcggatgacgcacaatgcgccctgcagcatcaccgcggcagctcgggtaaacacgacagatttgaatggacggcatctgacgggcggcgctccattatgtattcagcggcaagacaagacggcaccgcgtaacaaacaggcggcaccttttaaataggtgccgcctgatgtatttagctttgtttttcacgctgattgacgcccggcgtttgcttttacccttcacagccgtagcttttgcggtagcaagagtgattgacgcttttggcatcctgcaaatctccttcgcctcatcaacatccccctgccacggcatttctcattcagcggcacagttgcgcagaatgtatgcgcaactaaaaaaacccggatgcatccgggtttttcaagcgattgattaaaatacgtgaaagccgatcggcaagtgaaggccgagcagcactgtcaggacgagcacgataataaaaccgatccacagtccgccggttgatttgccttttttcttgcggatgacgagcatttccatcagtccgatggtaatgatgccgagcagcatttttccggcgtactctccgttccaattcgcaaaacggacaaaaagctcagctccggtcagaataataataatgtagaataagcgcagaatcatatgcgtaatttttgcgcccttcgcttttccggaaccgtacagcccgtagctgacaaataccaggataagcgcaacgacccatgaagtaatatgccaatgtgtcattatgttcaattccccctatcagatcaatctgcctcacttatggtaccacaacaagccgatcggagcattatcaatcgtgcgaaagacacacaattatccgatttggttcgacagcgtgccgatcggttcaattgtaatgtcaatgcggtcccccggctttaaaaatttcggcggcttaaacccttttccgacaccggacggcgtccccgtcgctataatgtcaccggcttcaagcgtcattccttttgacagcgtttcgattaagtcagctatcggaaaaatcatgtcacccgttgatcctgattggcgcagttctccgttcacccgcgtttcaactttcaggctttgcggatcactgacggccgacttatgtacaatgaccgggcccatcgggcatgtcgtatcgaggcttttgccgataaaaaactgtttatgtttcttctgcagatcgcgcgctgttatatcatttacaattgtatagccgaatatatgatcaagcgcatgttctttggagatgtgcgatccgctttttgatatgattaccgcaagctccccttcataatcaagctggtccgttacgtccaagtggctgtccactgtttctccgtgtcctgtaacggcagcgggggctttcgtaaaaaccatgggatgctccggtatatccgcctcactccccatttcaacagcatgatcacgataatttttcccgatgcagatcacgttctttgaaggtctcggaataggcgcgcaaagctttacgtcagacagcgcatacataaatgaacccgactcgtcattcggttttttcgcccattccgcaagctgtccggcatgcgcgacaaacttatctcctttttgaatgcactcgatcagcgaacccggaatcgtctcaagttcaaacaactttttttcagccttttgcagatctaagattttgtcatcatcaatgatcagaccgacaaatgttcggctgttcagttcccctgtcgcaaatttcatgttaatcccccatcatttttaaatctggcattcctttatgtattcttcctccgggcgggaaattcctcttttaaacaggctgaaaataagtgtaaaagagtatcaaaaattgtcacttttttagtcatattgacgaaataaaaccttcttggccaaaatgggttatactattgtcatcctatgttttccaaaataatcgagaattggagatcacacgatgaacaaaattgaagaaaaaagattaactttattcgagacagcgcaaaaattcggaatcaatgcaacggagaccatcaggtgcagccaggagctggacagccttttaaacgggtgccggggcgggctcatccaacaaacgaaagacagcgggctgaacccggccgcacagattgagcacggccgcaccgcaggaaaaaaagaggctttctcataaacgtgatatgtatataaatctgtatcatttatgtataagacccggcatgcgtaaagcgccggtgtttttacgtctaaagttttttccgctcacaaaaatgtgcatttgtcataagctattttaggcaggcagcccagataagctcctggagtgtagtcatgaaaatcttcacgaaaaggatgtgctcgtatgcccgcaattgtcggagcgtttaaaattaatgccgtcggtacgagcggagtcgttcatataggcgactgcatcaccatttctccaaaagcagaggttaagacatttgccggagcgggcagcttcaataccggagacaatctcacactgacgaattacaggaattcaacgaatgtgtacgataatgatgtaatcgatcagccgatggcaggaaacgcataaaggaggcgccgtatgaatttttacgtcaatcagtcgatccatatcaattacatgcgtgtagaatctgtcagcaattcctccatactgcaaatcggaagcgccggttcaattaaatctctttccaatctgtacaacacagggagttatgttgagccggcgccgcctgtcaccgcggggcagcagactgtaacaacagggggaggtcccggcacctcatcatttgtaccgctccagccgccaagccggtagttttaatgaaggaaacgagacgcgaggtgaatgtcatgtatgatcaatccgtttcatcctacctgcagaatttaaattctttcgtccagcagcaggcgcagcagattcaggagctcgaacggcagctgaaagaattccaaaatgaaatttcaacgctgaagcagcagccttctacaagaatcgatcggctcgagtataaatttgatcagctgaaaattgaacggctggaaggaacgctgaatatcggattgaatccgactgatccgaatgccgtgcaaaacttcgaagtcggccagacatctccgcaggtcggaatgatgcagcaggaacaggcgggccagcaaatgcagcaaatccgccaaaacgtcgatatgtacctgaatgaagaaatccccgcgcttttagagcagctcgaaactcagtatgagagcaggctggacgaaacgaacaaatatcatattattgaagatatcagaaagcagatggacagccggattcagtattatctgtcccatgtcccgaaagaagaaaacacggcgcccgcgcaatatgccgagcagattgccgaacatgtgaagcgtgatattgtcagagccgtcgagcactttattaagcacatacctggtgaaatgaaaggtgatgatccgtcatgatttttacagtgattaaccggaatattgaagtcggcgacatccggtctaccggtgtgtccagttcttccttattattaatcggcgacaccgattccgtctatctgtcttccatctttgacacgcctccggaatctcttattatcgggccttatgtgccgctggcgccggaataatgttaaagcgcatttcacgcctccggaacgccaaaatcaattcagtcgggattgcgagtgtctttcaagcaggcgatacgaatgaaatcaatatgcggatcaaagtattggccgatcagcgtactattgccttatacagagatgatgaaggctcatttaacaaaaaagaataccagatctttcggcagcccgccgtcatgccgttaccggaaacgggagtccaaagcgcattctgccatgaaaacccttcaattcgggtaaggaatgtgaaagttcaaggggtatcgtcagcgtccgtggttcaaatcggatcgacgtcgatcgttctgggagattcgcggctgaaacatattaggcagattgtcacaccaagctcacaatcacagcagccctgacatataatgacggtgagacttctataaagggtgtcgtttatgccagcaattaccggacctatagctatcaattccatatcgggcggagtcgtaaactttggtgattccttttacctttctccaaaaagctcttctaaatctgcgctcggttcgggagcaggcaataccggagatttcctgttattaaacaacgttgtcaatgcgacaaactatatagaccccgatgtcagcgatcaaaatgtggtcggaaacgcctaaaaagcagccgctctttcagaagagggctgcttttggttcagcgttattttcgttcatttgctttttttgtttttacaagcttttccggcggctgttttctgatccatttcacaaaccgcgcgagtttcgggtcacgccgcagctcttctattcccgcgagccttgccgcaagctcctgattcgtatagagagcgtgaacctgtttatgacaagggatgcagagcattgcggtcggaaggaatgtcccgcctttttccttaggcgttaagtggtgctccgtcagccgtacatgatggcggccgcataattcacatgtgccctcggcagaatcggccataattccttctcctttctacatgatctccaatgtgacccgggtgcctttcccgcccggctcggacggatgaacgattaattttttcggcagacgcgctctcagctcctgcacatggctgatcactccgacggataagttgtccgattgcagcttttcgagcgctgtgacaacggtgtctaagagcccttggtcaagagtcccgaatccttcatctaagaaaaagaattgcagcgggtattgcccccgcagctgaatctgggcggacaaggcaagcgcaagcgacagcgatgtcagaaacgtctctccgccggaaaggcttgatacgggccgtttgacgcctccgttcgcgtcatcacgcatgacgaaaccgccttctgaatcgactaatatggcataccgctgccttgtcaaagctccgagacgggcagaggcgtctcgagccacgctttccagctgttcttccgctaaaaattcgacgaatgtattgcctttacatacagactggagcttatcaagcctgtcaatctgtgtctgccagcttttcagttcggcttcaatctctttaaagcgcttatgctgtttttgcataaccgcgaaagcttttgcctgtgctcctttttcctccatggcggcgcctgactcagcctctgcctgcttcagcagagaaacggatgctgtccattcttcctccgatatccggcgctcggctaatttatcagtaacacggctgatatttgccgatagctgttttgaggtgtccaggaactcatctatttcttttttcatttcctctgcacgcccttgcggaagcagactttttttgacttggtccgggtcggcaaacccggtgtcttttgacctcacgcgccagtcgttttgcgctttctcaagggaggtctcagcatccctgagtgacatgagactcccggattcccggccttttgcgtcattcagtgattgctgcgcctgcttcagcgcgtcgaatagggactgttctttggattttaacagctgtaattcctgccgcaccgcttcaagctttgcggaaattgatgtttcttcagctgctgttccgagctcttgttcatatccgtcaatcacctgctgcaggcgctcagacgcatagtgaagctcgagccgttcccgttcaagccgatgcttcatctcctgcaggcgttctttctcctcttcatgttccttgaggaatgcgatgcttgtttcaatgcgcttctcacattcttctgcctgcctgtccttctcatctatcgaagcctgccaggcgtcaatccggtttggcggaatatcaccgcagacttcattgtactgattcaatcggctttctgacagcgattcaagctcttctaatgaatgtctgagacggccggcttctttttcctcgtagcggattcgttcggcaagctgctcagcttgtttcaccgtctgctgatgcgcgctgatcagtcttgtgaccttctcttttaccgacagcatatcctgtttcatttgtttccactccaagcggacggcgctgaacgcttcatcaagcgggcgtccgctgatggaagaagcggcttccagctccggaacccgggcgctttgcagaaacggacattcttcggtaaaacgccccgactgctcttctaatgcaaccttggctgtcagcacctcctgagaaagagccgccgcctcagaaagcagcgcttcaacctgctgcaactgttcctgcacagccgtatcaggcgagaatgtttcatgagcggaacgcgggcggtcatgctgcgtcgagccgcatacaggacaaggctttccttcgattagtttttccgataattcttttgttaatgcagccgttctcgcttcctctgagcgcctgcggagatcggcttgcgttttgtcagcccgttcggctgcggctttcagtgaacgttccgtttcacagaccatatggtaaacggtttgaagcgtttgataagcgcgcgtaatgtcttcctcttccgttttcgctttcgctgtgagcgactcgctttctccgttcagcttctccacgtttttcagctgcgttgtcagattggcccgctctttcgtgatttgttcctgtgtctgctgaaagcccgccgccagctgtgctgcggtctggcattttttccgttcatcggcggtcacttgaactgctttcagctcttctttcagctcattctgcctgttttggccgcgggtcaggcggtctttcactccggccagctgtttcgaggcggcttcgtattcttcctcttttttgctgtgttccgcatttgttttttccgcttcttttttcgcttcaagcagtttttgttcaatggctgaaagtctttgatacagctcttcttccttgacaagcttcggctcctgttcggccttatgggcccgccatgcttcataggcttcattttgccgggtaaatgaaacggtttccgcctctgatttccgtttggccagttcgtgttcccgttcggcgcgctgcttccggcggacggcttctgtgtaacggtctgcgtacggctcaagggcgagagctgtttccgcctctttaagacgctcagtcaaatccgtgatgtacgggcgtctttcctcaagctttttctcccggcgctcatattcatctctttctgtctgcaggttccaaatttcctggtgattctcaaagcgctcttttgcccggacccgtttcttctcagcttcttcaagccgttcgttcgcttcgtgaaactgctgttcagcctgcttcagcgcatcttctcctgcgtctccgagcccggattgttccgccagcatttcattttttttcgctgccgcttcctgcgcccgccgccgcaattttttgacaagcctgtccccgtactgttccagattaaacaggcgctggagcatatgtcttctttccgcgcctttaagcgacagaaactcggcaaactttccttgcggcagcacgacggctcttgtaaagtcgtcaatggtcaggccaagaagctcctctacctttttgttcacttcattcgctttatcggccagcaccgtttgttcgtctttgatttcaatcaagcggcagagggcggtttttactttcgtttcatccgttctcttaaaaacgcgctcgaccttgtaggaaacccggtggccggattgaagcgcgaatgtaaatgagacggcgagctgctcttcggcatgattcaggatgccgtgcgtattatttgcggcgcgctccacttttccgtataaagcgagtgtcatggcatcaaggattgatgattttccgcttccggtcggcccgaaaattccgaacaccccggctccggacagtccggcaaaatcgatggtctgttcctctctgaagctgtggagcccttttatcgttaacagaatcggcttcatgtcgcatcctcctcatcatctgttgacgcaagctctaaaaacagcttgaccatctcctcatccggcacgccgccgcccgtttgtttttcataaaacttcttaaagcgatcctcaattgatgtgtgtttcacttcaatccggtcattgccggtctctttttcttcaaaaaccggcctgatatggataaagccgggatgcgcctttctcagccgatgaatttcctcgagagaaagctgatccgtcaaatggatatcaagatcgatccaggcattccggtcacgcccttcatcgagccagccgtgaacctcgctcagcccctgcgctttccatttgacgagcggtttaccggaagacaggaaaatctcttcccacttcgcttctccgccgggcttcgcttctaccaccgtcaccgatttggcataaccggcttccgaaaagctgtatgccagcggagagcccgaataacgggcagccgtcttggcgcgcttgatcgtttgcggacggtggagatggccgagagccacgtaagccgcatcagccggcaggctgtcagcggcaactgtgtaagcgcccccgacttcaatcggacgctctgaatcggtctgatttccccccgcgacataaatgtggctcgccgcgattttcacggcatcgtcccggcacagtccgcacatgtgagcaaacgcctctctgattttgacatcgtaatgatcgcgaagaagcttttcctcaaacgtatcagaaagcacttcgtttaatctcgcctctgacggatatgccagcgcagctacggctaacagctcgtccgccgacggcacttcaatatgcacgggttctgtccgcggatagccgattaaatgaatgccgcgctcatttgttaacggagaagccgccgccagcctgtcaggattgtcatggtttccggcaatgacgacgaccgggcgctttccgccgtcagaaagcgcggaaagactttcgtaatacaattgttcagcgagcgcaggcgggttgaccgtatcaaatacatcccccgccataatgaccgcatcaatattttcttccttgacaatggtattcagctcttccaatacctcggcctgctcgctcagccggcttctgccttccagcgttttgccgaggtgccagtcagctgtatgtaaaatgcgcataccgcattcacctcactttttgatagaaaaaaagatccgctccaaaaaggagcttcggatcttgttacagtgtaagaacgtgacctccatcgaagaaatagagcgcacgccctttcactttcgtttttgtaatttgttcaaccgcttttgtatacaattcaatttgtgtttcataccttttttgcagaatcggagccgcgccttcaaatccgttccggaatttcccctctatccgatctgttttatagtccagcaaatagagaccgtccgcagtttcgtagaggcagtcaataatcccctgcacgagcagcggttcaccggccgtttcggcatccttgtacacctcgccggccggaagcgccatactgaacggcacttcccggtcaacccgcagcgccctgagaaggtctttcccgatttcagttccgaaaaactggacaatttcttctatatcaatagcttcctgctgttcttctgtcagcagctctttttcgtaaagcatccggaccgtccgctccgcttcttcggcagtcggaacgtgcgtcagcggtatgtgctgcatcaccgtatgcatcgccgtccctttttcggcggctgtcagcccttttttcatcataaaaccgggacgcctgtataaaagcgtgtctcctgacggtttgatgagagagcggccgctgtattcatcctcgtattcttgctttctcttcagctcagaaactgattgcttcgttctgatagccgtcagctctcggtacggatattcccattcaagcagacggcgcgcctgatcatcaaatgaaaacgaatcaggaatcggctcgccctgctgtattgcttttagacgtttgctcttttcttcagcacgctcttttggattctcttccagcaattcactttgctgcagcatccggatgtgaaaacgcgacgggtcgcgcgcgatatcctcagatgaggaaagtcccggcgtcctgtgcgcctccatgtcacggtggcggatgagcgccggcccgataaagtccaaataagatgacgcctgatagcggtcgaattcagaaagaagccaatcggcccggtctgcttgcgcctgccatttggccagctgtttttcccggtttttgcaggaaccgacgagaaacagcttttccttcgctctggtcagcgccacatacagtacgcgcaattcttcggataagagctctctgcgcatctttttcttcatcgccacaagcggaagagtcggatagctgattctgagttccggatggatatacttcgtgccgaaaccgagctctttatcaagcaggtatgatttgttgagatccatcatattaaaacttctgccgagtccggcggtgaaaacgacggggaattcaagtcctttgctgctgtggatcgtcatcagccgaacgacatcctcctgctcgctgagcgcccgggccgtccccagatcatcgccgcgctcctgcatccgttcaatgaaccgcaaaaagcggaataacccgcggaacgccgtcgcttcgtacgagcgcgcccggtcatacaagacgcgcagattggcctggcgctgctttccgccgggcatgccgcctgcatagtcaaaatatccggtatcgcggtatacttcccaaatcagctcagacaccgaatgattcgtcgaaaatgaccgccacttttgcagactgtcataaaaggttctcagtttttgatacagttcatcatgtctgtcagcgttcgctatatatgctttcagcgcttcataaaacggcgcttttttcttttcaaggcgtatcagcgcaagttcattttcgtcacagccgacgatgggcgagcgcagcacggaagcaagcggaatatcctgatacggattatcaatcaccttcaagactgaaagcgccgcagccacctccacggcttcaaagtaacccgacgtcaaattggcgtacaccggaatgccctggtttttcagctcttccattaattgcggcgcccacggcatggagcgcagcaaaattacgatatcccggtactggatattccggtgtgtttttgttttgccgtcatataccttaaacggagatgagacaagctttcggatctccccggctatcgctttcgcttcccagtgcacagtttcaaagtcttcggcatcctcggagctgtctgcgccatcagcgctgtcaatgagcagcagttccgtttttgccgcgtcattcggcggatacgatgcgccgagcttcaatgccgcctgttcatcgtaatccacttcgccgatttttccgcccatcagctgcttaaacaagaaattcgtactgtccaaaatatcggagcggctgcggaaattttggttcaggtcaattttctgccccgtgcctgccccgctttctgtaaaccttttatatttcccgagaaacagcagcggctcagcaagtctgaaacggtagatcgattgtttgacgtcgcctaccataaacagatttcccgcctcttcattcccgcttttaacaagctgcaggatagactcttgcacaagattcgtatcttgatattcatcaaccagaacttcatggaactggtcttgataataaacggccgcttcgctcggcacccgccggccttcttcatcaaccgcagttaaaatcgccaggcagtaatgttccaaatctgagaaatcaataattgatttttcttgtttcgccgcttcaaatcgttttccgtacgatatcacgagctgaacgagcgtttcgatgacaggcttcatatctgctaaactctttaagtgatcttgcggacttcttgtaaaataatcggtctttaccttttcgatcagtttcttcgcgccgtttcgcaaatcggtcgcttcgtccaaaagcgctttgtcaaattcatcaccctttaccgccttcgcccgtttaaaggagactgcgggaacccgttcatacagcgcatcgaagtcatgccggcagctgatcagctcttctatctgctgaaggtcatccagaaaattatcagcgcgcggggccggcccgccgggcacttttgtcagttcaagcgccttctcaagcttttgttttgccccgaaaagcgccatttcagcatcttctctcacatattggtaaaacggaagctcttccattttgctttcttccgtcacatcatacaggcggacaaagctttgcagccatacttccgggtcaggatgcgaccgggaatactcgtacacccgtttgacaaggtcttgaagatcaagatcatgcctgtctgtcgtatatctgtccgcaagctcaaaaaacgcctgattcccttttgcgtattcatcttcaaacagctcatcaagaacttcgtctccgagcaattcgccttccgtctggtcagccatccgaaaaccggggtcaagatcaatcatataataatattttttaagcacttgcagacagaaagagtgaagcgtcgaaatgctcgcccgattcaagagagagagctgccgtctgatatgcagagatcccggatttttggcgagctctttttctaatgcttccgcgatccgatgcttcatctccgctgctgaggcgtttgtaaaggtcaccacaaggagcctgtcaacatcaaccggatcttcttccgcggttatctttctgatcatccgttccacgagcacggccgttttacctgatccggctgcggcagcgaccagaatatcgcggccggaagaaacgatggcgctccattggtcatccgtccatatgctgtctttcggtttaggaatttgcatcatcatctgcctccttcttcagccaatccagtatggtgccgtctttttccgctttcaggctgcggtattcattttccttaagcgactcatcaaactggcacaccgattgaaacgcacagtacgtacaaggcgtcttatctttcagcttatacggagtaatggacacaagcccgtccgttatcgcttcgcccgcctgttcaaatgtccgccgcacatggtctgtcagcagatgaaagtcccgttcgctgaccgcggctgagtcggatcttaaagaaccgtcctttttcaaaccggcattgacgatatttgaacgcccttcctccaaagtcgtgtccatcaggctgatcgcctcccggtcaccgaggagaaggcctttcattttaaatttcttaaaaatttcctgctcgatttcatcaagccccatcggcagactggcctgaatcatcggatcgtggatatggaaatacaaaacgcctgccggggtcgctttcatgccgagccaatcttcggaatgtgtaatcgataagtcaagatatgtgagcatttgcagagcgagcccgtaatacacctcagccagatcaagccccctgtcgcttgatttataatcaacgattctcagcagcaggccttttgaactttccgctttatccacgcggtcgatccgtccgacgagttccatcgtacagccgtttttcagcgtgaaagtgagcggcggcagcggcccgcttccgccgaaaccgagttcaagaccgaccgggacgaaaccgctcgccttcgcatgctcgcttaatatgccagaaacacgcgtgacgatcttctgcagtttttccttcacataaaagtgtctgtttgagctgagcagaatctctttttgcagctttggcgcaagccgttccaccgcttcataggagaaattccggcactgatctttcgtcagatcgcgccattccagcttctgctcacgaagccggtctgaaatcagcttcaggctggagtgaaacagctggccgatatccggcgcgtccagcttgaaaaactgccgctcttttaattgaagcccgtgagatgcaaaatgagaaaactggcaggcattaaacgcctccatccgggagacgcttcctttaatatgctcgccgtaaagctggcgcgaaacaggccgttcaagacgcttcgcctcattgcggaaaaacaagcttgaaaacagctttttcgcacgctggtgatcaggctctttcatcagcacattgtatgcgctccaccatacgtcactgatctcgtactctcttgtccacagcctgagctgacttgccgtatatgtctgagccacctgtttattgacgagatactgaagctgctcttcttcgcttacctgctcgggatcagccgctgacagcttttcctgatgatcgggaaacagctcgccaagcctgtttacaacgattgacggcaggagcgtttttccttccgcatcggcaatcgggtatgacacataaagacggtcagacggacttgacagcgccatatagatgagaaaatgctcatcaagcagccgctcacgccccgcggaagacagctccactccgactgctttcagccactcccggtcatcatcagacagcacgccgttttcatccgggcgcgccggaagaacgccgtcattggccccgatgacgaatgtgcaggacgtgccgtacattcttgagagatccatattccctacaaatacttggtcaagcgcaggcggaattaaagaaaaatgaagcgattccgttcccgtttcaagcatttgctggaacagcgccaaagatatttcatcttcacccatcatgccggcaaactcctcgagaagctggataacggcatcccacgcctggccgtgctgctgcgcttcgatcatgtttccggcctcttcggcccgctgccttttccggtccagcttcaggggaacatcggtatcttccaaaaagagataaagagcctccgccatgctttgaaccgttttcgcttttttcatccggttttgaagccggacaaggggcgcggccatccactctttcgtctcattcagcatgttctccatctctatttcctgatctgtctgcgcgaaatcctcatcgagcgatacgaagcgcctgtatacaaaccgctcgccgctcgtccagcgctcccctttaatgccgtaggcgatacagtaattttcaagctgatcaacctgctcccttattttctgctccggctgatcaagcgggaataacagttcggttttcgcacagcggaacaccgcttcatatctccagttccccttcacgacatccaggcttgaacggatgaattcaataagcgggtgatgctgcatagaagcttttccgtcaataaaataaggaagcccgtaatcggcaaacacttccttcagcaaatctttataatcttccggctgacggatgagaatcgccatatctttgtaccggcatcctccgtcccggacaagtgattgaatttcccgggcaataccttcaagctcagctcttctgttttgcgcctgcatgacggtaaaagcttcctgtccgccggtatacgccgcggcgggacgcacatcgtactgcgactctatacaggcaagctccggcgcatgctgatgccgcttcgtgccatgcagttccttgcaggaaatatcggcattcaattcctttgccgtctgataaagcttatagtatgtgcttcccgtcattctgaacagatcgagctcatccggtgcctgttccgccgaagggctgtccgccgtcagcgagaatgtgacatgttcagcatgcatgatcagctgctccagcacccttaattcctgcggcgtaaattgatagaatccgtcgacgtaaacacgggcgccttttacaacgtccgccaaaggaatctgctgagcgagcagcgtcaaataatcctctgaatgcaaatagtgtccggcgaggcttctttccatctgctgatataaaatgcctaaatcatgaagtttttcagacagcatccgctctccgcgatattctgacgccgttccgctttccgccatgcgtcggacgtcttcaggctcaatacagtaccgcttaaactctgtcagcatccgttccacctgctcagtgaacccggttttgtcactcgctttttgatacactttaaactcgtgcttatattcttcaatcaatttccttaaaagcatctgcacacccgtcgtcgtcacaaacgggcggttcatgcccccggtatgctgaagcacgcgccacgccaaacgcgagaaactgaacacttgagcgcgtatcatgccgccgatatccggcgttttagcaagctcatattccattaaaaacgtcatttgatccgggactagaaaaatgatcggtttcccgaacggctcccggcgcagttcatcttgaatgctgtcgataatcagcctcgttttcccactccccgatctgcctactaaaaactcaacacccaaattagaagacccctctctttttatctttctacattttatcgaaagttgacgaaaatgaccaatctcatctgctggtaaaaacgggatgactgttttaaaaaatatcgtttttgaccaaaataaagaaaaaaggactaatgatgatgtcagaatatcccgaagtaattgtacggacggctctgtcgttcagcattctgtttatcggcgcccggatactcggtaaacaaaccatttcacagatgacgctttttgatttcattgcggccatctcgctcggcgccatcacggcaaatctgtcgtttaatacaaagctgccgattcattatcatgtcattgcctacattattttcgtggcaatcatttaccttgtcgcatatctttctatgaaaaacagggcccttaggggtttctttgcaggcaaaccgaccattatcattcaaaacggtaaaatacttgagcataatatgaaaacgatgcgttataccatcgactacttgaaccagcagctgcgtgtaaatgacgtatttgacatttctcaggttcagactgccatcattgaaacaaacggcagcatgtcagtggaggtcaaaccggaatttgcgcccgttacaagaaaggatctcggcatctttgccggacatgaaaagaactttgccgttgagctggttatggacggccggctggtgatgaagaatctggaagaaaaccacgtatcggaaaaatggctgagagaagaattggacaagagaaacctcaaaccggaagacgtcgtatacgctgtgcgcggaagcaacggccggctttttgtcgacacatacgacgaccatattacatcgccgctagatcaagaataaacatgacatccgcacatgtcacgggctgccgccgtataataccctataaacatccgggggtgagtccaatgcacgagaatttttttcattatacagccatctgcagtgacgattctgtgcttatcaaggatctggtaaaatccataaacggtgaatacagcgctgtgatttgctactcaatattagccgaaaaagcgccgaccgcagaaatcagaagacgaatcgaacatatcagagaggaagaagtgcgccacctgcacgctttctcttcactgtatacgtcaattaccggaaaacagttgacgccgaaacagacggagcattgtccgcacacatacagagaaggactgagggcggcgttttatgatgagcagaaaacgaatgatttttatttgcaggcatccgatagagcggtgcatccggaagcgaagcggttatttgcccgcacggcatttgacgaacagcgtcatgccgtctggtttttatacgatatggcccactctccttcccaccatacagggggaacggtatcaaacgcgccgaacacaagctacaccgaggtgaataccggcaaataacggttcaggcagatcacgctcccccgccgggagtcttcagaccgctgacaaaccccgttctttcaacatgagagaatggggtttacttttcgagccgttttatactccctctaaacaatggataccttcttcattgtataatcagcaaaaaccctttataataaaataaaccaactggtcggttttaaacgaaccgagccccgctttgccgggacaacgatatgaatgaggcggaaaggatctgtgtgaagtgacaaatacaaaaggcggtgccggaaagagcgaaaagacgaagaacaggctcgtatccgcttcgcgtgacttatttgcaaaaaaaggatattcagaaacatcgattcgggatattttagaggcggccgaaatcagtaaaggcaatctatatcaccattttaaaggaaaagagtttctgtttcttcatatcatggaagaggatcaccgcgtgatgatcgagacgtggagggaaatggaagctgatctgaaagatgctgccgaaaaactggcgggctttgcggagctgctcagccggatgagcatcaattacccgcttatgagagcaagtgaagagttttatgcgagtgcgtttacgtcagaggaggtcgtaaagcggctcaacaaaattgatattgaatatgacgatgtgatgagagagatcttagaagagggaaatcaagacggcagctggtccattcatcatgtcgaatcaaaagtaaaaatcctgctatccgtcttctacggtttagatgtgttatataaaaacgataccattcagcaaagaatcgaattgcaaaaagaagccatctccgtgtttattcacgggtcgatcagcgctgataaacagaatgacagctgacaaaggagaaacaacatgcaaaaaccgatcagagaacaaaaggctgtactcatcatcttattaagcaatatatttattgcgtttttaggcatcggattgatcattcccgttatgccgctgtttatgaatgtgatgcacttgacgggcagcacaatgggataccttgtcgctgccttcgccgttgcgcaattaattgcatcccccattgcagggagatgggttgaccgcttcggcagaaaaatcatgattctcgccggactgtttttgttcgcattatccgaactgaccttcggattgggcacacatgtctccattttatatttcgcaagggtgctggggggcatcagtgccgcttttatcatgcccgctgttacagcgtatgtcgcagatattacgacggtgcaggaaagatcgaaggcgatgggctatgtatctgccgccatcagcacagggtttatcatcgggcccggcataggaggatttattgccgatcacggcgttcgtatgccgtttttctttgcggcgggaattgcatttatcgcagtgatttcctctgtctttatgctgaaagagccgttaactaaagaagaacgcgcaaagcagctggaaagcgtcaaagaatcaactttcttaaaagatttgaaaaagtcgattcatccaaactacttgatcgcctttatcatcgtttttgttttggcattcggactgtcggcgtacgaaacggtattcagcttatttacaaaccataaattcggcttcacgccaaaggatatcgccattattattacgttcagctccattgtggcggtcctcattcaagtactcgcgttcggaagacttgtcaacttcctcggggagaaaaaagtcattcagctttgtctgatcatcggcgctgtgctggctttcgtttctacggtgatgtcaggatttttgcccgtgctcgctgtcacctgcatcattttccttgcgtttgatttactgcgcccggcactgactacttatttatcgaaaatcgcaggaaatcagcaggggtttgttgccggtatgaactcaacatacacgagtttgggcaccattttcggcccggctctgggcggtattttatttgatatgaatattcacttcccgtttctgttcgcaggtgtggttttatttctcggtctgggattgacctttgtgtggaaaggaaaagcgggcgaggtttcggagtagggtgcactcacccatctccggagctttttttgcgtttgcgataagaaaaatgaatggattatgagaaataattcattatttatttatctcaaaatctatactatagtaatagtaaggttaacgagcttaacaatttaatatgaatgtttcaggaagaagggttttcattgaagaaagacaaacatctccttacggatatctggtttattctcatcagtgcggcaggggggtttcttctttcgcttacagggatgtcgatcgcctggatgctcggaacgctggccgccggctgcatcctctccatgacgaggccccgctggctgttcatggcgcctgacagaagagggattcaccgcagatggcttgcagcgggacaaatgatcctcggcatcgaactcggccagaaactgaacctgtccgttctgtcggttttacgggagcattggcttccggtaggcttcatgctgattttctctatcgtgatggcgcttgtttccggatatgtgctctttcggttcagccggacggacatgatgacaagctttgtaggcacggcgccgggcggtttatccgccatgccgggtatcgcccaggaagtcggcgcaaacaccgcgattgtaagccttattcagctgacgcgcgtccttttggtcgtcatgacaataccgtttctcgtcattttcttatttaccaaacaaaacggtgcagctcagacatcagccggagccgtttcggcaggagcttcacatccgggccttactcccgtcttgttaacggccggatttattttggctgcctggcttgcaagcaaaggcgcaaaacggctgaaatttcccgccccttggctgctcggcagcatgatcggcgttgctgctgcggaaatcggcgtgtccgccttggcgggcaaagacatgctggcctggtggccgccggaagcgaaccagctgtcacaaatttttctcggcgccacaatcggatcaaaaatgtacaaaagcatgttcaccggcgtggcgagagtgctgaccgtcggatttatttcttccgtcggattaatcgccgccatgattctgagcgcggttgcggtttctaaattaacgggcatctccatgattacatctgttctcgccttttctcccggcgggatcgccgagatggcggcgacttcgatcaccctgcacgaagactcgactttcgtcgtcgcggttcaggtcatccggatcgttctcgtcatcgccatgcttccgcccttctatcggctgctgcaccacctttctcagctgaaacgggcacacggcgagagaggccgggcagaaagaggaacatgatccgaataaaaaaacacgcatccatatgcgtgttttttatttgaacagctctccgccgccatttacagaccgccagtttgctgaaagatcacggaacagccgttcagcaaataacagttcttcatctgtatagcggtctaaaaacgccaagagccgcttttttatcaattcatgatattcatgatgaagggaatgcagctctttcccggcaggagtcagccggaaatagacttcttttttattgtcgctcagccgggtcctgcgcagaaagccggcttccaaaaacttcgcgcagcttctcgacacggtcggctttgtcgtcttcattttttccgctattgacgtgacattgatcggttcatgatctccgatacacgacaaaatgtgaatttccgtcaaggtcaactgtaatttttttccgttttcttcacggagttcgtccatccgtccggccaacgacgccctgatgtcctcctgacacctctcctgctcgtgaaaaatatctgtcagcccttcaagaatcatgtgttttgcatggtctggctgtcttctgtccaactgctgaatcacccttccgtattgattgtttcttttactataacgttttgttacacaagaaacaatcacacaggcgcataaaagggcatcagatgaatccccatctctccaaaccggccagaacggcttcttccgcttcacgtcccgagccgccggctgcccatgccgcgtggccgtccggccggattaaaacggtgtggacgtcatcccaatcggcacgtgtttcagcaagctccgcactgacagctgccacgctgtccgtatcaataccggcgggaatgctccctcttaatgacaaaagcacaaaggcgcccttatgaagaaaatcatacagccgggccggccgcccgtcatgaagggtcaattcgatatccggcaggcgttttccgttcaggatatgcggcggcagctccgcatccggttcataatgcagatcaagcgcggatacttttcccgccaataaacggttggactcctgaaaatccagcaaagcggtcatcgtttctcttaaagccatccccgactcggtaaaatccatgagctttatctgggtttttatattgtgcaacacttcttttcctatgctgtgcctttcctgatgatagctgtccagaagataaggcgccgctttccccttcatttgcgccgccagcttccagccgaggttgaaggcatcctgaagccccgtgttcagcccttggccgcctgcgggaaaatgaatgtgcgccgcatcaccggccacaaaaacccggcctgatcggtattgttcggcctgacgctcggcattgccgaaccgcgacatccataccggatcactcaatccgaaatcagtgccgcatatccgccgcaggtcttctttcagctcattttcggtgaccggctcttccttccgcttttgcggagcgtgcggagaaacgatgaggacgcggaaaagtccgtccgtaagagggacaatcacaaccgatccctccaggcggcacgttgaaaaaaaggaagattcgggcggatgtttcaaagcggcatcacagagcgttcctgttaagtcggcatcagtgcccgaaaaagcgatgcccgcctgtttcctgacaatgctccccgctccgtctgtacccgttgcatataagctgtgaagagtgcggatcccgctttcgtcccggaacaccgtctccactccgtcatccgtctgggtgacagccaccgcttccgccccgcggatgatgtctgcgccgagacttgatgcatactcctccaaaatccgctccgtttctgcctgaggcagcattaacgaataattctgcttcgtatccagccgagaaaaatccagccgtgtatccagcatggaaaaatggccggaagacaccttcgtccctttttccaaaaagcgttccaatatgcctctcatggcaaaaagctcaagtgtgcgcggatgcataataagcgctttggaatatggcaccgtcttcttcaatcgttcaataacagtcgttttcactccggccagcgccagttctgatgcaagcataagcccgaccggacctcccccgataatggcagcctgtgttttcatctcatcagccctctttcatattttttgttacacgggtaacaaaatcaccaaaaaataaaacgcctcctttttgtttcgcgcgtaacaattttcattatagtcttccctctgcttttttacaatcatttccgaaaaaaaaagacgccgtttacttggcgtctgattcactgatgactccgacaatgtctttatccttaatcggaccgaaatgacggctgtcgaggctgtatatgcggttgtcgccaataacaaagtattgtcccttcggtatgcttttgcgcccggtcgtttccttcagcgtataatcaccggtcacatggctcccggcggacaatgatgactttaacggttttaaaaacggttccgccacccgttttccattcacatacagctgatcctccctgtatgcgattgactcgccggggagcccgatgacacgtttgatcagcactttgcggtgcgggcctttaaacaggacaatatcgaaacggcggatcgttttgtaacgatgggaaaacttgttgaccatcagctcatttccttgtttaaaggtcggattcatgctgattccttcgactttataatcaataaaaatggcattctttaattgtatggccaaaacaacgataagcacgccggctataaaccaaaatcgttttttcaagattcctgtctccctccgtctttctcatgctgactgattctcgtctgtaaacgccgttcgatatgctttccggcataccacagcaccgcgatcaccgtaatggcgcccgccatcctgaaaggctgtgtcatgagtgcgtgaagatcatacccgataaagctgatcataaagatcatgaccattttccccatagcggctgctgatataaactgcagcgcccccacccgtgacagaccggcaacgatatgaaccgcagcggacggcgtaaaggggaagcaaagcaaaataaacagcggaccgaaaccgtgacgctcaacccagagcatcatccgccttatggtctgatgcctgcggatgaaaccgaaagctcttttctgtccgaaacggcggacggcataaaacatcagcatcgatcctgccgcagacccgagccatgacagaaaaaaaccttcccacaaaccaaatgcattcgtattcgccaccacaaatacaacgagcggcaaaaacggaagaaacgcttcaataaaaggcagtgcagccgcagccgccgggccgaaagctctatagctttggaaccattccgtcagctgttcctcagtcaaatatgataaaaattgctccaacgtttatactccttaacgagtttgtctatccttattctacacattatctccaaaaaacgaaaatgtttacgagattttccgacttgaaatatcgtgtaagcgagtataaaataagaacaaacgttctcttttttaagaaagaaggagtatttatgcctgacatccggagcggcacccgcgatctcatcgaaaaagggctgtttctgcccatggcggctgccatcctgaaccgggacctcgaagcgcttgattcgtgcccgttcaaattaaaacaaccctataaacagcttatcagctgctctttaaaattagcacaaaaggatttgagtgatgttcgaaaagagttaagaaagcgtaaaattaaaatatacgaagcggaaagagacgaagcatttacgctttatatatgcaccattaacggctatgaagaaaaacaccgttatttcaacccgagaatacgggaacaggtaaccgccttattagaatattacctgtctcttgcgaccatttaaaaagcagccgggactgcttttccttttcaactaataaatttcagactattcacactatacattcgacatgattttctttataatcgggacacgctgttttcaatgaaaaggaggaatgttatgaaactgattcatgttctcgccgccctgccctttttcggaattctcgccggcattccatttgccaaccgggtgacgccttatgttttcggaatgcctttcattctcgcgtatgtcgtcatctgggcggtgctgacttccgttctgatggccgccgtttacaaattggacaaagaaaataaggcgggtgaggcggaatgaacgcagcatttcccgtaatggccgccgtgctcctgttttgtgtatatctcggaatccgggcccgaaaaggaaaacatatggaccttgaacaatggacggtgggcggacgcggcttcggcacgatgtttgtctttttattaatggcgggagaaatatacacgacctttacattcctaggcggaagcgggtgggcttacggaaaaggaggccccgccttttatattatcgcgtacggctgccttgcctacattttgtcatattggcttctgccagccgtgtggacttacgccaaacaacacaaactgatgtcgcaatcagatttttttatttcaaaatacaacagcccgctcctcggcattctcgtatcgctcgtcggcatcgcatccctcatcccctatctcgtcctgcagctgaaagggctcggattaattgtttcagcaacgtcatacggacagattccgccctcagccgctgtctggatcggcgctgtttccatcacgatttatgtgatgatatcaggaatccacggttcagcgtggatatcagtcgttaaagatatcatgattttaggcatcgtcctgtatttaggcatttatctgcccattcattactatggcggatttacggagatgttcaaacaaattgacgccgcaaaacccggatttctcacgctgccggaaaccggacagagcgtttcctggttcagctcaacggttttgctgaccgccctcggcttttatatgtggccccatacatttgccgcttcctattcggcggagcatccgcgggtgtttcggaaaaacgcaatcatcatgcctctttatcagctcgtcctgctgtttgtcatctttaccggatttgcggcgattctgcaggtgcccggtttaaaagggacggacacggatctcgccttattaaagctgtctgtgaaaacctttgatccctggtttgtcggactgatcggatcggcgggcattctgacggcgcttgtacccggttcaatgatattaatggcctcaagcacgctgttcgccaaaaatgtgtacaaagccattctgcccggcacgactgacgaaaaagtctcacggctcgcaaaatacgccgtacccgtcatcgcgctgatatccgtatattttacgctgaaaggcggaaataccatcgtcaccttgcttttaatgggctacagccttgtcacccagcttttccccgccctcttattcagcctgccgaagcggcgtttcatcacaagccacggcgcttttgccggcataacggccggggtcggaacggtggccttcattacgctgaccgaatcaaccatcggaaccctctttccgtttcttccgcagatcgttaaggatatgaatacaggcatcatcgcactggttctgaacattgccgtcatgtttgcagtcagcgccgcagtcagaaaaaaacaaatcagcgcagccgaaaaggcggcttaaatggtaagatagcggtaagatacacgaaaggggaaaaacgcatgatcatgacaacgaccgaaaccgtcgccggaaaacagattacggaagtgaaaggcttggtgacaagcagtatcgtccagtccagacacatcggcaaagacttgcttgcaggcttaaaatctgtcgtcggcggcgaattgaaaagctatactgaaatgctggaagactccaaaaaagcggtgaaagagcggctgatcagagaggcggagcagctcggagcgaacgccatcgtcggcctgcggttcgaactgaccgcaggacagaacacatccgaattaatcggatacggaaccgccgtcaccgccgaatccatttaaaaaaacaagcctctttaaagaggcttgtttttttatttctcacatgcgatatagtctttatctcggtcaagtcttttatttgcattgtaaagcgcttttgatacatacggcttgtactttgttctgccgcccttgtttttcactttcgacgatttggccacgccgcccttatacaccttattcagcgccttgcagttttgatacgttttcacctttgttttcgcttctgccgtctgccccgctccgtatgaacatccgaacacaagaccgaaagacaaaagcacagctgccgtctttttcatctctatcctatccccctcctaagttatgcggtattgctgaacatatcatagttcaaataatctccatttacaagataaataggaaaatagttttaatttacgtccgactgtatatcttttatggaatttttcccaaaaccttttataatatgaattgatagcgcgatctgactatgatgataggaggagaaatgatgatgaaaaaagggctttttgcgggtgtgctcactacagccgttctattcggcacatgtacggcggaaattccggggttgatcagtcccaatacggcggaagcggcgtctcagctcagcaaaggaatcggcggaagggcctacctgaacagcacgggttctgtactcgtcacgaaaattcagcttccaagctcaattcaggtgtcaaatgggacagcctatatttactcaggatttaccggaggcacagaggctgatatcggacttcagtacagtgacacctatcatgtatggaaaccgatcatgaaagtcggttcaaagggacaaggccaggtcaagtatctggaaggagaaagccaattcacctatacgaaaggcttccggcccggcagcaccgtacagctgaccatctacaaaaatctgaacggcaatacccgcgccacatattggggcacgaataatgacggatacaccggccgcatcatctcagaactcgcccaaacaaatgtaggctctgtctcaaaatggaaagcgctcgccaccgtcgcggtcacatcagaggatcagcgcccttacatcaaatcaaacttctcaacagcctttacgaacatcacgattgacaataaagcagtcacacctgtgattgatacacaggattttgccaaattgacagtgtcaggcagcagcgtcagcatgtctgtcgtcaaataaagaatgttgaacgcacgatttctgtcatcgtgcgtttcgtgagggtctgccggatacgcaaatcccttatttttcggattacgtttaataaacaaactctgttacattcaaaatgtcgatttctatataacaattagaggaacctcatttgttgaggttccccgttattctccaactcacgcaccggttaacttcacatactgtcagccggctcagggctgtccaattttagttagaatatagctttaacaggtcttgtgctggaaaacgatctgcatcgttcgcctcaacaaaatatgccaactgccatttttgtgtttcgatagcttgtttgctagtgggattttcccattcagggtaaactctaattgccatttttccttttgtagcggctgttttaaggatattttgctttacaagaacttcttttggaaaaacgaattgtccaaaatgattattactggcaaaagtattgataaccaataaatcagcagctttttcatatgaaaaggcttggtttttaccatctccatctttttcccaaaaagcaacaaactgtcctatcttgttaggcgttatttttgcgactctgaatcgaactgactttgaatgcagttgaaacataccggccccatactctgagttttgagcttcttcttgaatatcatgtatcgttaagtgatttggttcataaaaaattttatttacatatgttaacgccttataaaattcattcactgcgtactccttattttttatagtacgtcatccattgcttcttgattaaaatgggctgatcatgtgtttccaataaaaaaacagccctcctcagggttgtttttttaacatttctttcattatttccgccaaaatgctgagcagtccgccttatcctgaatattgaattgaatcatgcgttcaagcagctcataatgcaccggttcagtccattgaattctgaacaaacgggaagtagcgctgtagccggcacaggcaatgtcctcggcaaaatgcgcaattccagcttcttcgggggaaacacttacatgatgctttgctgccgcaaagccgataataaaggtgccgtgatcggtaaacatcggcgtgttccacttgatctgcgcttctaagttcggaaattggtcagccgtccacgacagaatttcctccattcgcagacgatgatcagggctgtcgatacttgataaatagtctttgaaaacgtccatgtcttcctccttcatcatcacgtccgctagcgccaaaaccccggatttccagctttttccttgatgttaaattcgatgatcttcttaagcagatcatagtgcaccggatcagtccatcgaattctgaacaggcgcgaagaagcgctgtacccggcttgagcgatgtcatcggcaaaatgctccatcgtctctttttcaggtaaaatgctcaaatgattttttgccgcggcaaacataatgatataggtgccgtgatcggtaaatgtcggtttgttccacttgatctgcgcttctaagttcggaaattggccagccgtccacgacaagatttcctctgctttgagacggtgatccgggttgtcgattcctgatacatattttgcaaacacatccatgcccatctctcctaaaatgaaatatcattactctttacatcatcatagccaacagacggacacgatacaactctgcccgggcatgtaaatcgaaaaaagccctccccaaaaggagaggacccgtcccttcacatcacagctttctctaatatctctcccccagctcccgcaaaataaagtcgtagatcattcttgtccgctcttctttcggatacagcatgaattcctgccgcttcgggacatgactgcccatcctgtcctgaaaagtggttctgagataggcggttctgtaaacctgattttcaaaagaatgataggatacttccagttccatcgttttgccgtttgagaacgtgaccgctgtgtcatcaaatgccgtcggttgaaaatctttaacgtgcacatgagatatccagccgcattgaggccttgcagaagaaagtgtagggaataaaaagatgtgatttgaagggtccaccataatcggcggcttgtgagaaattttaatcgcttcatatgttcccgcttttctcccggcatagctggagccaaagtagcggcagcttctgtcgatgatgtgaatcggcttcatgctgacatacagaatgcagtctttttcaatgaccttcgaccccattttaccgtctatttcctcaggcaaaacagcgatggttgaacgatttacttcgtagctttctaagggtgcatgtgttttctggcacataatgtgcagcctccaatccttttcttgaaaatttatactaataatctatcatctgtcattggaaaacgacaggttttttttgaatatagctaaaaatcaccttttaaagatgtaatttagtcttaaattactatttaaatattgtttttctttttcgtttcacctcatttatacgatgatcattttcgttttttcgtcaatttgcaggatatgtcgatatatttccaagtattagttgtctaaagattataaaaattaattgatttttccggccgttatccatatactataaaaaaggcattggggggattctttatgaaagagaaaaagtcgtacactgagctcatgaagtcccgcaacacgcaaatagcaaacgaattcgatgtgacaatggccgatatttacattcaaatggtgcttgatgaatccttgtataaacgccggctcgccatgctgaccatgcagattaataaggcgcttgatgataaaaataaagaagcgttcctcacgctttcaaaagaatatgcagcactcaaacagagtgaataagccaatccatatggattggctttttttacattatccgtttacgatggtgccgccgttcacatggatcgtctgtcccgtgacataggaagaatcatcgcttgctaagtacaaatagctcggcgccacttcaacaggctctcccgggcgctgcatcggcacgtctgagccgaagacttccacttccttcgccgagaagctcgccgggatcagcggcgtccagatcggccccggcgccactgcgtttaccctgatgccctgagtgacaagagattgggaaagagatcttgtaaacgtgacgatcgccccttttgtcgctgaatagtcaatcaatgttttgtggcctttataggcggtaatagaggccgtattaatgattgaacttccttttttcaggtgagggagcgcggctttcgttaagtaaaacattgaaaaaatattcgtctgaaacgttctgatgagctggtggctcgtgattttctcaatccccggctgcacgtgctgctcacctgcgttgttgaccaggatgtcaatggaaggaaaggcttggcccgcctggcggatgacatcgttgcaaaaggcttcgtcgccgacatcccctgcaatcagcagacacttcgccccctctttttctacatattgcttcgtctcttcggcatcctgatgctcatcaaagtaaacgatgaccacattagcgccttccttcgcgaataaaacggatacggcgcggccgatcccgctgtctccgcccgtgatgaccgccgttttcccttcaagttttttcgccgctttcggtttgtcaaaaacggggcgcgggtccattacatattcaaagcccggctgccggttttgatgctgcggcggcaaggttttcttcttctgattagccattttgatcactcctttacattaattactatattatgagtaatttgagcatcttatacgaatttcatgtatgaacagagtcttattggaaaaattaagaatatacaacagaggaggtaaatctgaattgactactttttcaaacgaggaaccggcttcctattggaaagcaacagctgacattccttcctttcccgccctcactgaagatacggaatgtgacgttgcgattatcggcggaggaattacgggcctgacaacggcatacgaactgacgaaaagaggtttccgtgtcgctgtcattgaagcagaccggattttaaacgggacgaccgcgggaacgaccgcaaaaatcaccgcccagcatgatttcatctatgccgatcttattcagcagatcggcctgaccagcgcaaggctgtatttcgaagcccatctccgcgccatggaagacatgaagcagatcatcaaggacctttcgattgactgcagactgattgaacaagacgcatatctttacaccaatacagaatcaggcgtcaaaaaaatccgcagtgagcaggaagcttataccaagctcggtattgaacacgagcttgtgaaagaacttcccgtccccgttgattgcaggctcggtctcgccatgaagaatcaggcgcaattccatccgcttttatatggcgcggcgctcgtcaaagagatcgttaaaaacggggcgcgtatttttgaacagacggctgcgatcgacataaaaaaagaaccgcagccggaagtggtcacgaaaaacagacacggcatcaagtgcagctacattgtctgctcttcccactttcctttttatgacggaggcgggctttacgccgccagaatgtatgcgagcagatcctacgtactcgcggtaaaaccgaaacaagcgtatccggacgggatgtatctcagcatagacaagccgtccagatcactgcgatacaccgatttgaacggtgaaaaactggtgcttgtcggcggcgaaagccacaaaacaggccagggaaaagaaatgtccgagcattacgaagcgctgaaacaatttgcggaagacacaatcggagttgaaagcatcccatatcattggtctgcacaagaccttgtcaccattgataaaattccgttcatcggtcccatctcaggcgatgaagaacatattttggcggcgaccggttttaaaaaatggggtatgacaagctcagcgctcgcggcgaagcttttggctgatcatattcaaaacaaaaagaacccgttttccggcctgtttattccgtcacgcttccacgcagatccgggactgaaaaaactgatttcctataatgccgacgtggccaaacaccttatctcgggcaaacttgagaggccggacgcttcacctgagactcttcggcccggggagggaaaaagcgtaacggtaaacggcaaacgggccggcgcctataaagatgaaaaaggctgtctgcatcttgtcgatacgacatgcacccatttgggctgtgaggtcgaatggaatgacggcgaacggacgtgggactgtccttgtcacgggtcccggttcacacccgacggcggggttgccgaaggtcccgccatcaagccgctgaagcgcctcagccaagattaactaaaccattctgtacgaatggttttatttttttgcattaaaatatttttatcagattccttcattcaagttccttccataccgataaaaagaaaaagagaatatctgggggaacttatattgttatttaaaaaagaccgcaaaaaagaaacagcttatttttcggaagccgatggaaaaaaacgcatcgcgctttcaaatcaatatgcagatgtccaaaaacagctgaaaatggtcaggctcggaaacgaagaacttcatgtgcttgaagagctgcagccgttaattaaagaacatatctcaacaatcgtcgattccttttaccgaaacctggatcacgaaaaatcattaatgacgatcattaacgaccacagcacggtcgagcgcctgaaaaaaacattacggcgtcatatccatgagatgtttgccggcacgattgatgatgaattcattgaaaaaagacagcgcatcgcttccatccatttgcggatcggccttgaaccgaaatggtatatgggagcgttccaggatctgcttctgtcgatgatgaacatatatgaagcaaccattccggatttgcatgagcttttaaaagcgatcaaagcgacgacgaaaatattgaatcttgaacagcagctcgtccttgaagcattccagactgaatataactgccagcgtgacgaacaagaggaaaagaaagcccgtcttcatcaaaaaatccaggaaacatccggatcactcgctgatttgttttcagaaacgagcagagccgtgcaggagctggtcgataaatccgagggcatttccgaggcgtcaaaagccggcaccgtcacttccgtacatgtcgaagaaaaatcaatcggcgggaaaaaagagcttgaaagccagcagcagcagatgaataaaatcgacgccagccttctgcagattgaagaagaaatggacaagctgaatgacatcgcccagcagatcgaaaaaatcttcggcatcgtgacggggatcgctgagcaaacgaatctcctgtcactcaacgcttcaatagaatccgcgagagccggggagcacggcaaagggttcgccgttgtggcgacggaggtaagaaagctttcagaggatacgaaaaaaaccgtttccaccgtatcagagctcgtgaacaataccaatacacaaatcaacatcgtgtccaaacatattaaagatgtaaacggacttgtaagtgaaacgaaagaaaaaatggcgcagatcaaccgtctgtttgatgacatcgtccaaagcatgaaaacgagcaaagaccagacaggcaaaatcgacgttgatttgcaggcctttctcggcggccttcaagaagtcagccgcgcggtttcccacgttgcatcatccgttgattcacttgttatccttacagaagaataaagataaaccgaccggcctttttcataaagggccggtctttttaatgttaacttgaaatataatagagttgacatatataaagactcgctttattgtataaacatattttgataagctggaggaatacataatgaaattgacagaaatgatgcatattgccgtgtttaccgccattatgggacttttggggctgctcccgccgcttttcttatcctttacgccggttccgattacgctccagacgatcggtgtgctcttatcgggaagcatcctaaaaccgaaagcggcgtttttaagccaattgctgtttttgctgattgtggcatgcggagcgcctctcctttcaggcggcagaggcgggttcggggtttttttcgggccgagcgccggatacctcatcgcatatccgctggcggcattactgctgagcctcagcatccaaggccttcgctcagctgctgtcccccatttgtttatcagacagttcttgttcggcgtgctgtttttgtatgtcatcggcattcccgttcaggcttttatgatgcacattgatatcttaactgccgtaaagctcagcctcatctatgtgcccggagatctgcttaaagcggccgcagcctcattcgcagccgtaagaatcaggaaaactcttcaagcaagccggcttttgccgacgaaaggaagctgattttagtcatcatgattacatcatcatattcagatacagccggacaagcgccggaacagatcgcaattcaggcagaaacagaacagatcacctatcaaacttggaacaggctagttaaccaaaccgcaaactggcttggcagcctttcaggtaagccggaaaacattgcaatattactgccgaacggcatcccttttttacaacttttcgcaggggcggcgcatgccggctgcacggcggttccgttagatccccgctcggcagcggcggaactcgcggatcagctgcacatcagcaaaaccggcctcgtcatctgtgaccgccggctgagcggcagactggacggcgtcaaaacgcctgtcatcctgtgggatgaatgcaggcctttgatcgaggcggaaaaaacggaaggcgcttttatcaaaaacgccggcctgcccttttataccggattcacctcgggatcgaccggtaagccgaaagccttcacccgctctcaccgttcgtggctggagagtttttcttgtacgaaacgtgaattcggcatttcccctgatgacaaagtgctggtaccgggcacgcttcgctcgtcacactttttatacggcgccgtcagcactttgtttatcggcggaaccgtcatccttcaaagaaaattcaatccggccggaatgaaagaccggctcagacaagctgacgttctatataccgttccgacaatgacggacgccctgctctcactagaggcgtttccggatacaccgctcaaggtgatttcttccggtgcagactggcccgcttcgtctaaacaagcgctgtcagagcgctatccccatttgcggttgtacgatttttacggaacgtccgagctgagtttcgtggcgttcttatcgcctgaagacagcgcccgaaagcctgacgcggcgggccgcccgtttgaaaatgttacaatcgaaatccgccggcccggcggagaacgctgcatgccgggcgaaacggggaagatttttgtgaacagcccgatgaaattttccggatacatcaacggcgcaaaacctgatgattccggctggatgacggttgatgacatgggatatatcgatcgtgaaggctatctttatatcgaaggacgtgaaaacgggatgatcgtatcaggcggcctgaatgtattccctgaagagatagaacgtgtgctcaaccgctgtccgggcgtcagaaaatcggccgtcatcggcattcctgatgattattggggcagcatcgccgttgcggtgatcgacggagatgcaaatgtaaaggaactgaagaaacagtgccgcgagcagctggcggcatataaaataccgaaaaaatggctgttttcagaaataccggaaacagccggcggaaagatcgcccgtgccgccgtacaaacgcaggcaaaggacatgatggaatggaagctgtaattacggatgcgaaacggacaattttcgcccgggaaaacggcctgttaaaagactgtctcccagaagatttggcagctccgctgatccgccatttgagccggaacatgcccgaagacattgatgaagtcctgatcggaaacgcgacgggccgcggcgggaatctcgcccggctgtcgtccttggccgccggacttcctttgagcgtgtccggtacgaccatcgacaggcagtgcggctccggactggacgccgtgagggtcgcgtgccactttgtcaaagccggcgcggggagcaagtacatcgcgggaggagcggagagcagcagccgttcccctttctcatcccgggcgcgcttttctcctgaacacatcggcgatcctgatatgggcatagcagcagagtatacggcacaggcttacggcgtaacgagaaagatgcaggacgaatatgcccttctcagctatgaacggagcatcaaagcgcacgaagacggcttgtaccgcccggaaattcatccctgtcacggattcgccgctgacgaaaacatgctgaaaaagcggaacatggagcctctcatctcccgtgccaagcccgtctttcagtccggaggctctgtcaccgccgccaacagctgcggaatttctgacggggcggcggcagtttgtgtgatggaagaacaaaaagcgcggtctctcggtttaaagccgggattgcgttttatcggaagcgcggtaagcggcgtccatccgcattatccgtcagcagctccggtttatgccgtcaaaaaacttttgaaggaacgggacctgtcaccggatgatattgatatatacgaaatcaacgaggcgtttgccgtcaaaatatgcgttttttcacagcagcttcgagtgccgtattctaaaataaatgtccggggcggcgctctggccgtcgggcatccgtacggggcttccggggcggcgcttgtcacccggcttttttatgaagcaaaaagacgcccggatgcccgctacgcagcagcagcgatcggcagcggaggcggagtcggactggcgcttctctttgaagtgttaacgtaacggcagtataatagatgatatcgataaaaaatgatcggagtggagactttatgactgccgtttgtttagtaagacatggagagactgattggaatgcccaaaagaagcttcaaggcaaatcggatattccgttaaatgcgacgggagagcgtcaggcgaaagaaacaggagagtacttaaaggggtccgaatgggatgtcatcgtctcaagcccgatgaaacgggccagaaaaacagctgacattattaacgggtttttgaatcttcccatcgtcgtcatggaagatttcagagaacgaagctacggtgatgcggaaggaatgtctttaccggaacggtcgaagcgctacccggataaaaactacccgaacatggagaccgcagaagagctgacagacagaatgcttgccggtttagtgaaagttcaggagcaatttcctgatcaaaaagtactgatcgtcgctcacggcgcagccattcatgccctcttgtccgccatttctgacggtgataccgacatccaaaacgcaaagcttgtcaatgcgtgcctgagcaatatcgaacgaattgaaaataagtggcgcgtcaaagattacaatgtaagcagccacctatcagaatcataacaaaaaggcccgaattcagttttgggcctttttggcgagcatttttttctgcagatcatgtaatatggcgtccgcaccctcaatgctccggcgctccgtccataccgccctgtccgcgcggtaaacgtgtccgttttttacagctgtcagctgtttccagaggtgatttttttcgagttctttctcaccgtccaacagcacgatgtaatcaggatcgatatgcaaaagctgcccggacgtcattttgatagagtctgatttcccgccggaatccgtctggaccgcataggtaaaccctgcgagcgtcaaaagccgggacgtaaaaaactgatcatcctttacggaaatgctgtcatttgcagcgtcaattaataaaatcgtgccgccttctgcatccagctttcttttgatgtcattcagcttttcttcctgagccgacaattgtttctctatgatgccatctttaccgaccgccttttcgatagtaagggcagcatcaaccgcatcgtgataatccgcagcttcattttttaaagcgattgtcggagcgatctttgtcagttttcggtatatccccttgtgaaggcttgagtctgcaatgatgagatcgggctttaacgaagtgatctttttcaaatcagggtgtgacggtggtccgacggacggactgccgtcgtttcgctctgtccggttatccgccgcagccacaggctttatgccgagatcatggagggtatcaataaagccctcattcaatacggcgatgcgctgcgggtgcgcagccacatgcgccgtccccagatcgtgcctgacggcggtttcatgttcctgttctgagcatgccgttatgaagagaacggataagatcatcagcatactgaaaatttgtttcatctgttccccctctttcgtttttccgcaattatatcattgacaatataagtatcaatgatattcattatcattatttttataaaatggtttcacagcttttctccgtcaagaaagccgaagactgattcatgccggccgctttatttcattccgctttcgtttccatcagacttctgcattcaacaaaaggtgacatttatcctgtttttgccgcagcttccaaaaatggaatcaaaccgttcgacccagcaaacaagagagcgattgcggctgtgtacaaatactcatgtccttccatcggttttttccattaaaatttaaatatttcgggttcctattaaacgaaagagagatgatatacctaaatagaaataaaacaaattgaaaaaaattgggtctactaaaatattattccatgctatacaattaatccacagaataatctgtctattggttgttctgcaaatgaaaaaaaggagaggataaagagtgagaggcaaaaaggtatggatcagtttgctgtttgctttagcgttaatctttacgatggcgttcggcagcacgtctcctgcccaggcggcagggaaatcaaacggggaaaagaaatacattgtcggatttaaacagacaatgagcacgatgagcgccgctaagaaaaaagatgtcatttctgaaaaaggcgggaaagtgcaaaagcaattcaaatatgtagacgcagcttcagctacattaaatgaaaaagctgtaaaagagctgaaaaaagacccaagcgtcgcttacgttgaagaagatcacgttgcaaaagcgtacgcgcagtccgtgccttacggcgtatcacaaattaaagcccctgctctgcactctcaaggcttcaccggatcaaatgtgaaagtagcggttatcgacagcggtatcgattcttctcatcctgatttaaaagtagcaggcggagccagcatggttccttctgaaacaaatcctttccaagactacaactctcacggaactcacgttgccggtacagttgcggctcttaataactcagtcggtgtattaggcgttgcgccaagcgcatctctttacgctgtaaaagttctcggcgctgacggttccggccagtacagctggatcattaacggaattgagtgggcgatcgcaaacaatatggacgttattaacatgagcctcggcggaccttctggttctgcagcgttaaaagcggcagttgacaaagccgttgcttccggcgtcgtagtcgttgcggcagccggtaacgaaggcacttccggcggctcaagcacagtgggctaccctggtaaatacccttctgtcattgcggtaggcgctgttaacagcagcaaccaaagagcatctttctcaagcgtaggttctgagcttgatgtcatggcaccaggcgtctctatccaaagcacgcttcctggaaacaaatacggcgcgtacaatggtacgtcaatggcatctccgcacgttgccggagcggctgctttgattctttctaagcacccgaactggacaaacactcaagtccgcagcagtttagaaaacaccactacaaaacttggtgatgctttctactacggaaaagggctgatcaacgtacaggcggcagctcagtaaaacataaaaaaaccggcgtcggccatggccccgccggtttttttattatttttcttcctcagcatgttcaatccgctccatgatcgacgggtggctccctctgaaaattttgacgagaaacggcgggttgacccggctcagtcccgtatcggccaaatcctgaaacgtctcaatcgccgcttcccggttgccggtcagctcgatgccgtaacggtcggcggcgttttcttgataccgggagacggcattcgtaatcggatcagaagcaaaactgagaacggatatgagcagcaataacagcgggagggcggccagatcttcaggcccctttatatgaagcattcggccgaagaatttggacagccgcttataaagcttgtcaatgatatagaacccggctaatgacagcaggagatacccggccagtccgatgtacacgtgcttcatcacatagtgccccatctcatgccccataatgaacaaaatttcccgatccttcagtttgttaagcgtcgtatcccacaaaacgatccgcttattcgaaccgattcccgtcacatacgcattcagcgcattcgttttctccgacatatttacttcataaacatggctggccggaatatcagccttgtcggcaagcgacaagattttgctttccagctccttgtctttcagcggatagaaatcattgtataaaggatcaatcacgaccggctgcagaaaaaacaaaaacagggtaaacggcacagtaagacaccaagcgtaaaaccaccatttttttgtatgctttgtgatcagccagtaaaacacaagcacacacacggcaaacagcggaaaactgatccagaaatcaatgacatggtctcttatccagcttgctgttgtctgcgtcgaaatatgatacgcaagcgaaacccgatatccgatccactcaagcggaagcgaagccgccgtaacgatgagtgaaatcacaaatacgaagcttccgatttgcagcacccgaaagcgcaccgctgcttccagccaatgctttatttttttggcaagccccgtaatgagcagcagaaaaaataaaaaccaatctaacggcgcaccgatgaaaaataaaaaatcctttacatttgaaaagttttcagcggcttccaggcggcccgggtccataaacgaggacggatcggctttcgttccctttacggcctccgggacggcggagtcgcctgtcataaagaaataccaatagaaaaaaaggccgtacagcacataggcaagtcccgctgccgctatccatttgcgcatggaagtctccctccttagccttatgacttactcctattgtaagcataaatgcaaataaatagaaccaagcctccgaaacggatgttaatcttttcacaacagaaaagaatggaacaacaggaagcgggaaagactaaaagacggagtgatgaatatgaaaaaaataatcgcgtttattgtagtaatcgcccttttggttattgctttcttctatgtatacagccggaccggcgatgtgtttccatcaagcaacgcagatctgattattctgtctgagcacggaaaaaaagagatcaaaattaaagacaggcagaatgtaaaagatatgctcgatatcttgaaccaaggaaaacaagtcaaactgaccaaaagcgtatctcccgattacgacggaacggtcaaataccatgaagaccgtttcgattcattcagcatgtggctcgaaggcggcaattatatgctgtacaagtataaaaacacgtattacaaactgacccggcatgatacgaagcttgtgcaaagcatcattaaggaagaatcgcagagctgaccggatcagcatgtaaaagcgaagcccccggcttcgcttttcgtccgtcatttcggaagcatgtcccggaccgcccgcctcagcagcttcccggtcgcgttcttcggaatctcatcaagaaaaaccacttccgccggccgtttatattttgccaaatgtgtttcacagtaatcaaaaaccgcctgctctgtcagctcaccgtcccccggcactatataagcatgcaccgcttcccccgttttggcgtcaggaacgccgatgaccacggcttctttaatgccctcatggctgtagagcacttcttctacttcgcgcggatagacgttgtatccgccgacgagaatcatatctttttttctgtcgacgatataaaaataaccgtcttcatcgcgcttcgccaaatcacccgtgtacagccagccgtctttcagcgcgtgctccgtctcctcgggcatcttgtaatagcctttcatcacattcggccctttcacgatcaattctcccacttgatggtcgggcaattcgcgtccgagcgtatcgacgactttattttcgacatgtaaaatattcgtcccgatcgagccgggctttctcccccggtcaaacggattaaaacaagtaaccggagacgcttcagaaagtccgtacccctccagaatggtgacgtcaaaggtttgttcaaacgtctgcaacagagcgaccggcatagaggccccgcctgaaatgcacagtctgacggacgcaaaatcctccgccttgccgtgctcgtattgatacagatagttatacatcgtcggaacgccggcaaaaatggttgcctgacggcttttaatcagtttaaacacagaagccgggctgaattgcggctcgattaagacacacgctccgctcatcagaggcgcattcatacaaacggttaaacaaaaaacgtgaaacatcggcaatgccgccacaattttgtctttctcattcattcctaagtatccggcgacatcatttgcattggagaaaagattctgatgggtgagcatggcgcctttcggttttccggtcgtccctgaggtgtataaaatgacggcagtatcatctttggacaatatcggataagttctgctgcgctccgccgggcagagcatttttgcaaacgttgtcatttttaagcgcaattgagggtcttctgtcgatggagcgttctctgctgtctggctgataatgatatgctccagcagcggcagcgagccgtgcaggctttcaaatacgggaattaaaaggtcgatgccggcgatcgctttgacatcgccgtttttcagcatgtatgcgatttctgaaggtgtatatgccggatttacaggtatgacgacaattcccgcttttaacgcaccgaaaaacgcaataacaaaatcaggcgtatttccgagcagcagcgcgagatgatccccttttttcagtcccctgtcctccaagccgtttgcaaatgctttgattttacctgccagctcctcatacgtcatgtactgatcttgaaacagacaagctggtttttccggtttctgcgatgccgtttcttccaatttggaaaccagattcattttcccacccctttaaaaattgtaatgaatgaatagtcattcatttatccggaataaacgttcacttttattatagaaaaatatagaaaaacactcaagggcaaaaagccccgagtgccgtaaaaccggaaactataattgtttcagcgcttcactgaccggcgtgctgcccgctgtcagatcgaatgctttttcatacgtattcggttcatcaagggatgcgataacggtcttggcgacatcgtctcttgaaatggagcctctttctaaatcggctgcggctttgatatttcccgtgccgggatcatttaataacccgcccggccggataatcgtatacgtcagaccgctcgcttcaagaattttatccgcataatgctttgcggcgtaatacggcttcagcgcttcattccaattgccgcggttatgagcctgaagggcgcttaccataatgaaccgcttgatgccggctatctttgccgcttctatcgctttcgcggctccgtcaagatcaatcaaaagcgtcttatcgtatccggtgcttcctcctgatccggcggtaaacacaatcgcgtcacagccttcagcggctttcgcgatgtcttccgggcttccttccaaatctgcaagaacggcttctgttcccgcggcttgaagcgcttctttctgctcttgtttccggaccatcgcccgcagcgtatgcgtgccgtctttttgaaacatcccggtcagacgctgtccgatctgtccgtttgctccgatgagaaataccttcatcatgatccctccccattcattatggttctatcatttcacaaaaacgggcgctgattcaaatcatgcgttcggcaaatgttctaataaatcagctcgaggaaatcttccagctctattttgccgaaatactgtttcagatcgattccggccagcgcctccctgatagcggttcggtcatactgttttccgatcagcgcctgttcgacttcactcacatctttcgcaccgaagaaatcaccgaaaattttgcagtcctgaatgattccttttttcacttcaagacgcagatcaatcgatccgaccggataacgtttcgaatgctgaaggttaaatgcgggcgacctgccgaaattccagtcccagttttgatagcgctcttcggaaatcttccggatcgctttccagtcttcatcggtcagtttatattccggcacttcggaaagatcatttgtattaaaaatatggtgaagcaggtgctttttgaattcatccgccgtcattttgtcatcaagaaactcgctgatgttggcgacacggcttctgatcgacttaatgccttttgattcgattttgtcttttttcactttcaaggctgacacaacatgatcaatggcggaatccagcattaatgttccgtggctgaaaatacgccctttcgtcgaaaattgagcgttgccggaaatttttctgccgtccgcgacgatgtcgtttcggccgcttaattcagcttccacaccgagctggcgcagcgcctgaataacgggttcggtgaattttttaaaattgtgaaagctgtcgccgtcatccttcgtgataaaactgaaattcagattcccgaggtcatggtaaaccgcgccgcctcctgacagcctgcggacgacgatgattccgttatcttctacgtatttcgtattgatttcttctattgtgttttggttcttcccaatgataatcgacggctgattgacataaaacagcaggtatgtctgttcagggtcgagatgcttcacgcaatattcctcgatcgcgaggttgatcctcgggtcggttatgttttggttgtcgataaataacatggtgctcctcctttatttctcccacttcaatccggaagcggcgattgtcacttcgcccccgaacacggataccgcttcttctttcagcttccggtgctcgccgaaatgaggcagatgcgtgagaatcagctcccccgctccggcctccttcgcgatacgtccggcttccaaactgttcatatggccggctgacgtgccgtcctggtctgcgtaaaaattgcactcgcagatcagcagatcggcattttccgcaaacgggataaacgcgtcctggtagcttgaatcagccgtatacacaacagaagctgaaccgtcagtaatccgcatcgcataacaagtgaccggatgcactgttttcagaaaggtaatggtgaacggacctagagaaagcgggcggtccggctgataggccactccctttgtatgcgttttatatgtaaggcgctcaaactgttctatatcagcatcatgcccgtaaatcggcagtgcatgcgtcccttttccgagaaaggagccgacctgtttggcaaattgaagcggcccgatatcagcgatatgatcatggtgataatgggacaaaatgacggcatcaagctcttctgccggaacataggcaaacagctttgataatacggcgcttccgcaatcgacgagcagagaataaccgccggactgaaacagatagcctgaagttgcttcgtttgcggccggaaacccgccgcagcatccaataactgtaactttcatataatcctccgaatgtttatgataaaaagatcctttcctccaatatacctatttttcgtacaaattgcatgttttaaacattgtgtcaaaacagccgttgattttccaaaactgttataatacaatgtagagacaaaacaatgaaagagggatgggtatgttggaaaagatgtcggattttttcagaaatttacccggtaagaaatgcgaagaatgcggaaatgagattgttgagcagtatgagtgtcacattaatctgtgcaatgactgcttgaaaattaaggatatgtgacaatagggcgccgcacaattctaagttgtgcggcgcccgttttttcggccgtcatcatactttctgaatagggcgttattcaccattattagcaattatctgtacgttttaaaagattcagtattttcaatctatatttttctatagacggattgttttcttttctattataatttgttctaatagctatctttttagatacttattgcacttttttcttcgggaggtaatctatgaaaaaattacgctttggactagcgacgcaaattttcgtcggactcatactaggggttgtagtcggtgtcatctggtacggcaatcccgccattccaacatatttacagcctatcggcgatttgtttttacgcttaatcaaaatgatagtgattccaattgtcgtctccagcttaatcatcggcgttgccggcgcgggaagcggaaaacaagtcggaaaattaggcttcaaaacgattttgtattttgagatcattaccacttttgccattattctcgggctggctttggcgaatctgtttcatccgggaacaggcgttaatatacatgaagctcaaaagacagatatcagtcaatatgttgaaacagaaaaagaacaaaataacaaatctatcgcagacacattcctgcatatcgtaccgacaaacttcttccaatcattagccgaaggagatctgcttgccatcatctgctttaccgtgctgtttgcactcggcatctcggcaatcggtgaaaaaggaaagcctgtcttggccttctttgaaggtgtttctcatgcgatgttccatgttgtaaacctcgtcatgaaagttgcgccgtttggtgtttttgcgttgattggtgttaccgtttccaaatttgggctcagttccctgctttcactcggtaaactggtcggtttagtatatgtagctttggctttctttctcattgttgtattcggaatcgtcggaaagcttgccggagtaaacattttcaaattcctcgcctatatgaaggatgaaattttattggcgttcagtacgtcaagctccgaaaccgtactcccccgcgttatggaaaaaatggagaaaatcggctgtccgaaaggtattgtttcctttgttgtgccgatcggatatacctttaacttagacggatctgtgctgtaccaatcaatcgccgctttattcctcgctcaggtataccacattgacttgtccatttggcagcagattacccttgtgcttgtcttgatggtcacttccaaaggaatggctgccgtgcccgggacttctttcgtcgtcctgcttgcgacattaggcgcattcaacattcctgcagaaggccttgcattcatcgccggtgttgaccggattatggacatggcccgtacggtcgtcaatctgaccggaaacgcgctggcatccgttgtgatgtcaaaatgggaaggccagtatgatcccgttaaaggcgcgaaggtcatgagcctcgccaaaacagaacaaaacacaaccatctcaggttaaaatgaaaaccctgcacggaatgatttccgcgcagggttttttatgccatcggcgataaaacgtaccggtgcaaaagcttcgccgtattaagaagcgataattcatgcgtgcgttcaaaagcgtgtgaagcgtcaattcccgggccgatcagcccatggacgatgtcatggcccgaacggatggctgctgaggcatcagaaccgtaatacggataaatatcaagctgataatcaatgccatagcgctccgcaagcccggccagatgttttctgagctgataatggtacgggccgctcgcatccttcacgcaaatggagacggtatattcatccgtagactggccgtcgccgatcgcccccatatcaacagccaagtattcaacggtctcaggaggaatgttggaattgccgccgtagccgatttcttcattattagaaatcagaaaatgcgtcgtatacggaagttcgattttctcttccgtgatgcagcggattaaattcaagagcagagccacgctcgctttgtcatcaagatgccgggacttaataaagccgctcggcgtaatctgcacgcgcgggtcaaatgagatgaaatcgccgaccctgatgccgagatcggacgtctcttccttcgtccggacaggctcatcaagacggacttccatattctcctgattccgctctgccttgccggcgtccttgtagacgtgcactgaagtctgatgcattaagatggtgcctgtataggttttgccggaagaagtttggatctcgcaatattccccttcaatcgagtgatatcggaagccgccgatcaagtcaatcttcagccggccgtccgcctttatctcctttaccatcgcgccgagcgtatcgacatgcgccgtcagcaatctgtgtttcttgtcatcacggccgggaattgtgacaaaaagaccgcctttgcggtttctgtaagaggagacgccccattcttttaaaagactttctgtataggcgataacctcgtatgtattgcccgtcggactcggaattgacaccaattctttaatcagttccatcgtatgtttcatatttgccacaggtcattcctcctatcaattttattcttcttaaaatatactcttttgatccataacccgtccaatcttttccttctcttttttcatagaatgaagggagcatgagcataggagggaaatgtatgatcagccgtaaaccgcacaagcggaaaagatttcataatgattggtttgaggattggtttgaggatgattggtctggtgcagccttctggggctgtaaaaaagaagaagatcactgtaaaaagaaaaaagaagacccttgtaaaaagaagaaagacaaaaagaagaaagataaaaagaagcatcatcattcatgccgccgctgctgccgtcattggtaatcgttcacacaagcccgttttacaaatagatatctcatgctccccaaacagcggatgctgcttgggtttttttattaaaattagtaccaagtaataatatcaggtgttataatctgatataaaggagtgattttttcatgtcaaaatctaaaattacagcaatcggtacatatgctccggcacgccgattaacaaacgcggatttggagcgcatcgtcgatacatctgatgaatggatcgtccagcgcaccggtatgaaggaaagacgcattgccggcgaacatgaattcacatcggatttgtgtgtggaagcggtgaaaaaccttgcagaacattacagcggaactcttgatgatgtcgatatgatccttgtcgccacaacgacggcggactatgcgtttccaagcaccgcggcacgcgtgcaggcttacttcggctggccgcacacgggggcgcttgatattaacgccacatgcgccggactcacttacggccttcagctcgcagacgcattaattaccgccggttcccatcaaaaagtgattgtcattgccggtgaaacattatcaaaggtaacggattatactgaccggacgacctgcgttcttttcggagacgctgcaggcgccctattggtggaacgcgatgaatcagcgccgggctttttggcagccgtgcaaggaacagcgggaggaagcgcggacgtgctgtatcgcacgggactgagcacagaattaaacggcgagccgcttaaaggcggaggaaacatggtgcaaaacgggcgcgaagtatataaatgggcggccagaaccgtgcctgaggaatgcaatgcccttttagaaaaagccggcttttcaaaagacgatctggattggttcgttcctcacagcgccaacatgcggatgatcgaatccatctgcgaaaagctgcccttcccgcttgaacggacgttgacaagcgttgaatattacggcaacacttcatcggtttctattattctcgctttggatgaagctgtgaaagcaaaaaaactgtcggaaggccagacactggtattattcgggttcggcggaggattgacatataccggactgttggtgagatggggattttaatagcacgacgatcgaaatctaaaaaaaagaggccctgagcatctgctcagagcctctttttcttatgctgttatttcttcttccgttttgtgttcttttttgctttgcaccgtaaaatacacgatggtcagcgcgatcatgacaacggcgatgcccaacagaatggatgcctgctgccacatgtagccgtagtcgccatttgaaatgacggcacggaacccgttgatgctgtaagtcatcggcagtgccccgtgaatcacttgatagaatcccggcaggagttcaagcgggaaggttcctccgcttgccccgagctggagcaccagaatgatgacagcgataaagcgtcccggattccccatcgttgtcgccaataattggatcatcgacaggaacgcgatgctggtaatcatcgtaaagagatagaatctccacgtgctttccacatcaagcccgattccttttaacagaaccgtggcgacaataacggattgaatcagtccgacaagcagaataacactgaatttgctgaggaaccattcaaaaccgtttctcggacgcccccctgaagcttcactcagagggaatacgaccgtcagcatcaatccgccgacatacaagcccatagagagaatataaggcgtcagtccggtaccgtagttaggcacggaatgaatcgcgttatcgtccgtttttaccggatcggcaaacatgctgtacgttttgtcatctgtcttaatgtccccggtttgatcagccgcatctttcagctggctggacaattgtccggtgccgtctaaaagtttgcttaaaccggtgccgagagacgcttgaccctgctcaattttggacgagccgtcatggattttgttttgcgcgtccagcagtttcgttaagccgcctgatacttggccgctccctgacactaacgcttctgatcctgatttgagctgtccgaacttgctgttgtattcgccgatgccggctgtcagtttgttttggctttcaaaaacggtctgcgctccgctgtataatttatcagttcccgctgtcagctggttaatcgcgtcttgtaccgccgctgcgccgttatacagtttcgatgtggattgaggcagtgctttcagctgatcagccttcgcttttacatctttgagcgcgctttttatgactgacatatccggaagctgaatatctcctccggacggaagctggctgacgatattgtctaaatccggaaggtcagccttcggaagcttctcattcagaagctgaacaagtttcgctttttgctcatccgttaagaaatcactgtccttaatcacctttttgaccgcgtcatcccgggcatccaggctgtttttcagatcagaaagcttcttcttaaactgctgcaggtccttttcagtctgttcgagctgcccaaccgcgttttcaatgtctgacaggttgactgaattgatcgcatcttcaaatgccgccgctttttgcgacacttcctgcgccttgctgtttaacgcgcttaatccattcgttaaatccggaagcttttgctggagctgcttttgtgcgtcaaggcttgttttcagcccgctggccacttggcctcctcctgaagcaatctgtcctgatttatcttgaatttcggcgcttgcgctctgaagttttgcgatagagctgtcaagcgtttgaattccgcttgtcactttcgccgcgccgtctgcaagctgctgtgttttatcgccgatggtggcggtgctttcagtaagcttcgctaaattttccttcagcttggcgctgccgtctttcgcgtttttcgtgccgtcgtctattttcttggctccgctgctggctttgccgagccctttggcaatatctttaaagttatcaaaaatgacttttgcgtattgctctgtcacttctttcgacacggaggctttcagtttgtcgatcgccttttccccgattgtcgcgccgacatagtttgatccggcattcgtatgatatttcagatccagcttcttcggatttttatccattaccgtgctggcgtttttagaaaaatcttcaggaatctcgaccaataaataatatttagcatttaataagtcctttaacgattgatcaagatcgcttgaaaaatgccaatcaaaattatcatttttctttaactctttcacaagatcgtcaccgatctgaagatgtttcccttcgtagtccgcccctttatcctggttgacaacgacaaccggcagctgatccaccgtgccgtacgggtcccagtacgccttcaaaaacactccgctgtagatcagcggaacgaataatatggcaatgatggggattaacagtttcttgttcgttacaatgtctttccactggctttttattgtattcaaccctgttgcctccttccgcaaactgactcatttgacaaaacggtcacggcacctaaaaagtgaaggatcatctattatttagataatccttgaccaacatacatttccagcaattcagcgatcgtctctttttcaagaggcggatggtttttttcccagtcaaatatcagcgcgatgtagagcttgagcatcacaaaagcggtcagttccggatcacacggtttaatgcttccgttttcaatggctgtttctatcttttctttaatgtatgacagaatggcccgctccattttcgcaatgacatcctgaacggctattgtaccaatctcggcgttctcctgaaaaattttaatagtcagctggtgtgtttttctgaattccaaaatcgcgacaagcgcccggtggacattttcgtgaaatgaaagctccggtttcatcgcttcgtctgcgtgttccttcatttctcttaaaatagtggtgaaaatatcatcaaacagttcttctttgtttttgaaaaacgtgtagatggttcccttccccacatttgcaagctttgccaccagatccattgtcgttgctttgtagccgaattgtgtaaaagacttcgttgccgcttccagaatgagctttttccgatcgacggacatgtttcccacctcgttaaattgaccgtttgaacgttttagtcattttgtacataagataacttatcacagtcacaaagaagattcaaatgttttctctctttattggtgttccctttacagaacgggaacatgcaaaaaaacctccgttttacgataacggaggctggtacgtttcaaataaataagccagtgaatcgtatacggcggcttttccttggtcgatacagtcggggatgcccaccccttcgaaagacgcgcccgtcgcgtatacgcccggataggaagctttcagcgcatctctgaactctttgatgcgctccttatggccgacatggtattgcggcatgctttcgttccagcgggtcacacaggtcatttccggttcgccatttattttcattacttttttcaaatcttccattacgattttaatgatctcgttatctgaaagatctacgatggattcatccccggcctttccgacgtacgccctgagaagcgttttgccctccggcgccgcgtgcggccattttttattcgtccatgtgcaggccgtgatggagaagtcgctgtttcttgagataacgaatcccgtaccttcatgctccatcttgacggctccctcaggaaaacctaaagcgacgttggcaacggacgtagaatgcatgtctttaagacatgaaaccgccggcagatcagaaagcattttcgccgcggctttatgcggggctgttactatgcatccttccgcatagagcactttgccgttatcaagcgtcacagaatatcctttctcctcgcggccgatatgggtgactttcgttcctttcatcacctttgtcagcgtaagctgcttttccagctcctccaccaacgtttgaagccctgtcgtcagcgttaaaaactggccctgctttttggctgtcagctgctgtcccgaaggctgcggacgcgattttttcatgccgagaatcaggcttctgtgcttctgctcagtctgatagaattgcggaaacgtggacatgaggctcagcttatcaatatctccggcataaatccctgataatagcggttctattaaattctcaacgacttcgtcaccgacgcgtctgcggaaaaattcacccagagactgatcttccttcggtttgctcgcaggcaggacaaagtcaagcgccgcccgcgcctttccgggaacagaaaataaaccggtggagatgaacggagcgattttggtcggaatgcccataaccgcgcccttcggcatcggatggagcgtctcgttgacgagcacgtaagactggccggtcgcattgttgacgagcagatgctcaagccccaaatccttgacgagctgcggcgcgctttttttcctttccaaaaaagaatccggcccccgctcaatgatgtagccgtctttatgctgcgtctgaattttgccgcccgctctcgggcccgcttcaatcagggtgacctcaagcggcagctgtttttccttgatttctttttccatgtagaaggcggcggctaatcccgttatgccgccgccgatgatgaccagatgttttttatcgccactcatttttatcgccttctttaccgtttaattctacttgtccagctctttcagcacgaccgctgcaagcgcgtcgataaattcaggctgtgcgttcggcatagccggacgatagtagcttgcgccgacttcttcggtcacagctttgcattcataatcattatcgtaaagcacctctaaatgatcggcaacgaagcctgcgggcacgtatacaaatgctttataaggatgcttttggtacagctcgcgcgtgagatcctgcacatccggcccgagccacggatcaggggtgttcccttcgctttgccagccgactgcgtaatcggtaattccggcgccttcggcaatcagttttgcggattcctccagctggtcaggatacggatcgccgtattctttaattttttcaggaaggctgtgcgctgagacgatcagcatcgcgtcatcccgttcttctttcggcattgattcatatgttttcttcacctggccgacccaataatcaacgaatttcggttcatcataccagctttcaacagacttgatggtcaagccgccgagcttctccgcttcttctttcgcgcgtttgttgtatgactggacgctgaatgttgaaaaatgaggggcgagcacaaggctgacagcttctgtaatgccgtctttatgcatgtccgccaccgcgtcttcaataaacggttcaatatgttttaatccgatgtacactttgaatgttacgtcatcctggatttcatttaaacgctgtgcgagcttctccgcctgctcctgcgtaatttttgcaagcggcgaaatgcctccgatcgcttcatatctgtcttttaaatcttgaagcatatgaggctccggctttcttccgcgtctgatatgcgtataataacgttctatgtcctcttctttgtaaggcgttccgtaagccatgacaagaagtcccattttctttttgctgctcattttgttacacacctcttttgatggtctgtccaccttgattttgacaggaaaatctacttataaccaacgatctgctcaggaagattgttccgtttttttggccgcggagtattcatgtacaaacgccgtcagctttttcagcgtttccggattgacatctgggaatacaccgtgccctaaattgaaaataaacccgtccgttttcatgccttgatcaagtattgctttcgcttttttctcgatgacttcccaaggcgcaagaagaagcgacggatcaagattgccctgaaccgtttttgtaatgccttgttttctggcgtcatctatgccgagtctccagtcaagaccgacgacatcaagaggaaggtcatgccaatccccggccaggtggcttgcgcctacgccgaacatgatcagcggaacttgttctgctgaaagctcccggaaaattctgtccatcaccggttttataaactgccggtaatcttcgcggttcagcgcgccgacccatgaatcaaaaatctgaatggcttttgcgccggcgttaatctgcgctttcgcataaacgataatcatgtccgcgagcttgtccatcagcatttgccacgcttgcggcatactgtgcataaacgcttttgttttgttgtaatttttagaaggcccgccttcaatcatataactggccagcgtaaaaggcgctcccgaaaaaccgatgagcggaacattcagctgttcgtttacgagtaatcggatcgtttccagcacgtaaggaacatcctgttcgggattcagttcgccgagcttttcaatatccgcagcagagcgcaccggctgatcgatcaccgggccgattccgttttttatttcaacatccactccgatataaggaagcggcgtcataatgtctttatataaaatggcagcgtccactccgtactgctcgaccgggagcctcgtcacatacgcgcacagctcgggctgatgcgtaatttcgactaagccgtacttttccttcagcttgcggtattccggctgagacctccccgcctgtctcatgtaccagacagggacgtgatttgttttttctccccgtgccgcttttaaaaacgtatcattaaacgcttctcgtttactcatctgaatttccacctttcctcctgcaaccatacgttcgtgttcttcgcccattacactataccttgttttttcaaaagcgtatagaattgaggcttaatgttcaaaaaatcgccgaattcatgattaagaagaaaaaagcttcggctgaacgtattccgttccctctccttcttgatccgtctgtgaattatatggaacgactttgtatgaagcccctgaaaacagattggcatacggtatgtcaaagctgccttttcctttcaccgaatccagaagtttgtcttttccgtctttcttctcatatattcggtaaacaacccgatcatccttttgaatatcccattttaattgaaccgtaatcagtcccatcgccttaaatgtataacgggccgacagggactttaccgcctccagctcaatcgggctgcccagttccttcacattttcaggctttttgaatgtccggccgttttcccccgcttttgtgacgatatctttaaagagtctgaccgggtattggcttccgcctttcaggtaatgggttttatccgttttgtcatagcccatccagacggctcccgtcagtccgggagtgtatcccgcaaaccaggcgtcctttgtcgcgccggggacgccgggaaatgtggtcgtgccggttttccccgccaggtcaccttgatagctgccttgtgaagcggttccttcttttacgacctgctgaagcattctcgtcatattccatgccgtctgtccgctgaagacgcgcgttttgccgtttttaggtctggacaacgtttctccgtcttcgtccgtgatgttctctataaaaaatggcttcgtatacattccgtttgccgcaaaggtatgataagctccggcaagctgaagcggagtaacgccttcagacagaccgcccagcgcaatcgcgagtccgttgtcagaaatgttcatgccgtttttctcaagatacgattttcccgtatctacgccgatctgcttcaatgtccagacagcgggcgcatttatgctgtaagtgatcgcatcctgcatcgtcacttcccccttgtactgtccgtcataatttttcggttcatacccgtcgtaggacgtcagtttgtcttggagaagcgaatacggtttgaacttgtcttcctgcatggcgggcccgtatacggcaatcggcttaaacgttgagcccggctgccgcttcgccgtaaccctgttgtatccttttgtcacgtagtcgcggccgccgaccgccgcgcgcacgcctccggttttattatcaataaagacggcgcttccctctgccgcctgatccgtccccggaaaatagccgctttccttcatgagggtgtatgccgttttctgcagcttggaatcaagtgacgtccggatcgtataaccgccttgaagcagctgttcacctgacatcgaataacggtcttccgcctccttgatgacaagatcaatataactgtcaaaccaaggcgtttctgatgttttcttgacattaagccccaatgtccggccctgggctctgacggcttccttggcgctgatatagccttggtcgttcatcattgcaagaatcgtatcgcggcgttctttatttttatccggatgctgaatcggcgaataaagagatggcgccttcggaatcgctgccagaacggctccttccgcaacggttaaatcttttacttctttattaaagtagtagtgggacgcggcttgaatgccgtaaacgccatggccgaaataaagctggttcaggtacatttcaagcagcttgtccttgctgtaatcacgctcaagattgatggcgataatgacttccttcgtcttgcgcaaaaatgttttatcatgagtcagaaaaatgtttttcgccagctgctgggtgatcgtgctgccgccctccaccttgccgcctgctaaaacatcccggaacaccgcccggccgacagacttcacatcaatgccgtgatgttcgtaaaaccgtttatcttcaacggcgataaaggcatctctcacatcttccggaacctgctgaatggataccggctcgcgattttccgtatagaggctcgcgatttcatcaccgttttgatcgacgatttttgaagatgcgtgcagtattaatttcttttcatcgatgacataatggccgagaaatataatgataatgtatccgattaacgcgagaaaagcggttgccgccgcaattacagccggaataaagaatctttttttctttttcagcataagtcacctcgcctttcttaacttgtagtatgggaaatattgtttcgaattatgtcagaatgagtcgccaatagaaacttataccactcttttgatatactagcaagcaggaggtggctgatatgaaggtttatattacatacgggacagccgattttttaaagacgattgcaaagaaacacccgagtgagaatatggtgctgatgcaagggggggataatgcggttttaattcatgaaacaaatggagaaaccgtttttcaggcgccccattcctatgaaagcatcgacagcgtcggggaaatcaaaaatccgggctacgccgtcctcaacaacatcgccgttacccaggaaggccgtccgctgtttgaaaaccggtttaaaaaccgcgccggcaaagtggaaaatgaacccggttttgaagccatccgcgtattaagaccgctcgaaggcgatacgtatgtcattttgaccctgtgggaagaggaaaaagcctttcagggctggcagcagtcaaactcttatcaggaagctcataaaaaacgcggaacatctgcaggcatcgacacgacgtctattttctcccgcccgtcttatgtaaccgcttattacgcaatagactgaaaaccgccggagattctccggcttttttgatgtcccgattttacgcatccttctttgcaccttccgcccgcctatgaataatctgtagcaatcctatttataaacggagtggttcaattggggatcggcgtctactcggtacatctgctttatgttgcttttatcgcggccattatcgtttttatgctcctcaggaaagatacaacctttatttcactcgccggcatttttgtgattgcgctatggacgacgcattcattctccgcttcggtcagcagtctgtttcacagcttcacgtatgcagccggagaattgctgccgacgatttttatcatttgttttatcgtggcgatgagcggccttttgaccgaaaccggtattaatgaagcgatgatttctccgtttgcaaagctgatgaaagggccggctgtcgcgtattgggttatcggctgtctgatgtttgccatctctctttttttctggccgtccccaggggtggcgctgatcggcgctgtgctgcttcccgcagcgatccgggcgggcctttctccgatcgccgcggctatggcgatgaacctgttcggccacggattcgctttatcgggggattacgtcattcaggcggccccgaaattaacggccgatgccgcgggcattcccgtgagcgatgtcatgcaggcaagtattccgctcgttttgatcatggggttaacgacgacaatcaccgctttcttcctcatcatgcgggatcgaaaaaaaacgaaggcccccctctccttggacagctccggttctttggacacaagtatgtatctgccgaaaaacctcagggtgatcctggcggttttcattccgcttgtttttctcgccgatattatctgcatgatcgtataccgcctgcaaggaaacgatgcgacggcactcgtcggaggaaccgcgatcggcattctcctgatcattcatttcattgtatataaagagcggcatttagaaaagatcaccgagtattttatcggcggttttcaattcggctttaaagtattcggccccgtcattccgattgcggccttcttttatctcggtgacgcggggtttaaaagtattttgaacaccccgctgccgaaaggatctgcggggatcgtcaatgacctcggattggccctgtcccattcttttccgatgtccggagaattcgccggcatcgccctggccgcagtcggtgccattaccgggctcgacgggtcagggttttccggtatatctcttgcaggctcgatggcaaagctgttttccgccgcgcttcatacggacccggccgttttaacggcgctgggccagatttcagcgatctgggtcgggggcggaacattggtcccttgggcactgatccccgctgcggctatttgtaaagttgacccgtttgagcttgccaggaaaaactttatcccggttgcggccgggctagtcgtcacaacgatcgccgccatcatcattctcccgtagcaaaaggattgaaatcttctgacattttctatacaatcatgggaaaagcagacgagggggacatcgcttttgacgttaacgacacttcaaaaaagcttaaacgctcagcttgacgggctgtatgaggaaatggttgaaatcaggcgtcaccttcacatgaatcccgagccatcctttaaggagaaaaaaacgccggcgttcatcgcctcattttatgaaaagctcggcgttcccatccggacgaatgtcgggggcaacggtgtcacagcctatattgaagggagtgaaccgggaccggtcgtggcactcagagctgattttgacgctttgccgatacaggatgaaaaagatgtgccctatgcttcacaaattcccggcgtcatgcacgcctgcgggcacgacggccatacggcggctttgctagcggtcggaaaagtgctgtaccgcaaccgggaaaaactgaaagggtcatttgtgatgatccatcagcacgccgaagaattatctcccggcggagcaaaagcaatgattgaggatggctgcctcgagcatgtcgatgccattttcggcactcacctttgggcgactgaacccgtcgggacggtcttatgccgcccgggcgcagtgatggccgccgctgacggctttacgattaaagtcatcgggaaaggcggccacggcgcgattcctcacgatacgaaggacgccgttttaatcggctcacaaatcgtcacggctcttcagcatatcgtcagccggcgggtaaatccggtgcagccggccgtcatctcagccggctcgttcactgctgaaaatccgtttaatgcgattgccgatcaggcagtcatatcaggcaccgtccgctcgtttgacgaaagtgtgcgcagcctgctcgaagcagaaatagaagccgtcgtaaaaggaatctgttccatgcactccgcttcctatgaatatcgtttcaagcgcggttatcccgccgtcgttaatcatcctgaggaagcggcgcacgcggcggcagccgcagcggaaacagacggcgtcacgaaggtcattgaaggagagccgcagatggccggagaggatttttcctattatctgcagcatacaaaaggcgcatttttctttacgggcgccgctttagaaaatgcggaaaccatttatccccatcaccacccgaaatttgattttaatgaaaaagcgatgctgacggccgccaaggtgcttatcggcgccgcggtaagctacccccgatagggcataaaaaacagccggtacattacgtaccggctgctgtgattcttaaatgaaaaacgtgccttgccgtctcaccgagctgtgacagcagtttataattggccgctccgcccacggcggctccgacgaccggcaaaagctgaaacaatttcactacgtccagataatcgcggtattcctgctgaaaaactctccaatcgacatcatgctttttcgaatcccattgttcaatcattgagtatatgcgtttccgctgttcaccgcttgagaaagccagctgaaaaataaacagcaaaaacaatcgctcatccctgtctttcacatcatagccgtaaatggaggcaagatcgaacagacatttcattttaatggataacagcaaagggaaatcagccatccctaaaaaaattccgccggcccccgtaccgataccttcggctgccgcgaccttttggtacgatgcgacggtttgtctggcgagggcatctttttcagcaagcgtcataccgtttgtatcccgcttgcttttcaccagatttgaacccgccattgttgcttcggtcatttttttaatgctttctgtgatgacggcatgaattttatcgggaatccgctcatttattttcgcctgcattcctttagaaaaacgttcaagcatagaatctttgcgcaaaaaacgcgctttccattgcagtgcttcctgtatcagctgctgatcgtcggtcatctgtgtctccttctttcattgaggtttcaaaaacccgattgattacagcttgccgtactttttcaatcttccgcccatatacgaaggcatgatcacaaaaatcagaacggctgaagcaacggccgcatacagcgccccgctgactcccgcggcataggctgacgctgcacaaaacagcagcgcctgcacggttaacgccgatttcatcagcgaaaagaaactttgcagcttcgctttctgattgaccgggtaaagctcctgcagagaaagatgatgaaaatgcccgaacagcgggagaagctgtattcccgtaataaagacggtaaatacggttaacgccgccgttatccacggattggcggaaacgagcataataatcaggataaaaataatcgtgagcctgacctgaatgccgagataatcatttgaacgcagaaaggcccgcgcatacatataggagaacgttttccgctgttcgaacggaatcattctgagcaaaaagtcgagatacgcccggcgttttgcctgttttttcaggtgaggcacatcggtaaacagattggcgattctgtaaaaccgctgcttccttcttaattcatattcaatatgggcttcccattttaatgatttatgttttgcggccgatgtgaaatacacataaaggccggccatcacaatgtagacggcggcagcgtacacataaaacgactgtaagacgaagtataaaagcagcatattgcagataaagcgtatgaccgcatccatcattttcatgcttctgtcattcataaacgtcatccgccactccatggcctgattccacgcttttaccgccagcatctgaataaatacggcggcatacgacgcaagcgacgcccccggacttacagcgaaaaacagaggcatgcatacaagcgacagagcaagaagcggaaacagctgtgacagatagctgtacttaaatgaatgcttaaagtatgtccccattttcggttcaagcggcagcagaaacacgaggtccgcttcctttagcagcgtccggacgtatgaaccggtcagcacaaatgaaaagagcaccgccatcacccaaaatgacggaaaatgaacgggaatgtctttgacccacttgctgtaccagcttgccgcgccggcaataaaaaagatcagcacaatgacgagatgatcattgagcatatatttcatatacattctggtttcctttatatgctcttcaagccgggactgccaaatcgtagacatattattcatggccggcgtcttccttcgtcagttcaatatacaagtcatcaagagctgcgtcttccatgccgaactgctctctcagttcttccagtgtgccgcttgcccgcacttcgccgttatgtaaaataatgaaagcatcacagtagcgctctgccgtagccaggatatgcgttgacatcagcacgcttgatccggcttttttcgcggcgtccatccgctccagcaatgcattgatcgcaagcgggtcaaggccgagaaacggctcgtcaatgatataaagcgaaggctccgcgagaaacgcgcacatgatcatgactttctgcttcatccctttggaaaagtgagcgggaaaccatttcagccttttttccattctgaattctttcagaagcggaggaagccttttttcaagcgtttctttggaaaggccgtacgccatggccgtcagctccagatgctccttgagcgtcagttcttcatacagcaccggcgtttctgggatgtacgtaaattgcgagcggtagctttccttatcctccgaaaacgtcttgccgttcagctcaatcgagcctttatgcgggtccattaatccgataatatgccggatcgtcgtgctttttcccgcgccgtttaatccgatgagtccgacaatctggttcggctcaagggtgaatgaaacattttttaagaccgggtttctcgtataaccgccggttaagtcttttaccgatagcagagacataatttctccccttctgattcgtttttcttcatagtaccaaaaataaagtctgatttgaaacgattccctttttttctcacgtgaaaagtgtgcatagttatcgttttgggggacatcataatgtatgtagaaggaaacagctttaatcaactgaaaatgaggtgtttataaaagacgtcttagaacagttggatgaaaatcaacatgtcctgtgcttacaatttcttcacacactgctttgatgatgttcttcattcatgatgaaataatcaaatgaggtgtttgtcccaggaatgattaagcagacccataagtcttcattttaaaaacaaatgaggtgcttacaaaaggcatattcaattttctatgataaagctcgtacttctgcatcagggtgaacgcgcagccgttcatcctgttttttgttttggccgtttttgtggtacgatgagaatatacatatatttcttttcagggaggaaacccatctatgcacaaagcggacgattgtattttctgcaaaatcattgccggtgacattccgtcttcaaaagtatacgaaaatgaacacgtcgtggcgtttcttgatatcagccaggtcacaaaaggccatacgctcgtgattccgaaaacacatatcgaaaacgtgtacgagtttacgcctgagctttctaaagaatattttgaagcggtgccgaaaatcgcacgcgccatccgcgatgaattcgagccgatcgggctgaatattctcaataacaacggtgaaaaagcgggccaatcggtgttccattttcacatgcatatcattccgcgttacggaaaaggcgacggtttcggggctgtctggaagacccacgccgaagactatacgcctgacgatcttcaggagatcgcttcaaccgtcagaaaacggcttgcctcatcttaaagatgaggtttttttgcgtccggaaacacaaaaaacataaattatatttttttataccaaaaaaatcaaaaaattgtgataggataattgtattatttcttacactaaagcggaaaacagggagagatcgtaaacatggaacgtacaacgaatttcaatgcaggacccgcagcccttccactggatgtgctgcaaaaagcacaaaaagaatttgtcaacttcaatgataccggcatgtccgtcatggagctgtcccaccggagcacggaatatgatgcggtgcaccaaaaagcaaaaagccttctgaaagaactgatggatattcccgacgattacgatattttatttcttcaaggcggcgcaagccttcaattctccatgctgccgatgaactttttaacgccggagcaaacggcgcacttcatcgtaacgggcgcatggtctgaaaaagcactcgccgaggcgaaactgttcggaaacacatccgtcacggcaacaagcgcagattcaaaccacaaccacataccggaagcggacctctcaggaatcaaagacggcgcctatctgcatattacgtcaaacaacacgattttcggaacgcagtggaaagagttcccgaattcaccgatcccgctcgtagccgacatgtcaagcgacatcctgagcagaaaaattgatgtcaaaacgtttgatgtcatctatggcggagcccagaaaaacctcgggccgtccggcgtcacggtcgtcatcatgaaaaaatcatggcttgaaaacgaaaacgccaacgtccctaaaatgttgaaatactccactcacacaaaagccgattcactgtataatacgccgcctacatttgcgatttatatgctgagcctcgtccttgaatggctggctgaaaacggcggtgtcgaagcggctgaacggcgcaatcaggaaaaggccgatgtcctgtacggcacaatcgacgcaagcggcgggttttacgcggggcatgccgcaaaagacagccgttctcacatgaacgtcacgttcaccctccgcgacagcagtctcacgaaaaaattcgttgaagaagcgaaagcggctaaaatgaccggactcggaggccaccgctcagtcggaggctgcagggcgtctatctacaacgccgtcagcctggctgattgtgaaaaactggctcagtttatgagaaagttccagcaggaaaacgaataaatttcttctaacataacggttcctttgatatactgtttgcatatcaatttttccggccatcgcaataaatgacgagcatattattggatggcgaaaaagcttagcagaggagagcttagtatgaaaacaaaagaattagtcattatggccctgtttgcggcaatcggagcggtgcttcattccattatgccgccggtattattcggaatgaaacccgatatgatgcttgtgatgatgtttatgggtattctgttattcccccgtgtgcagaacgtgctgatgattgggattgtaacgggaatcatttccgcactcacgacatcttttccgggcggacagcttccgaatatcattgaaaaaccggtaacggcgtttctgtttctcgcgctggcgcttttggtgaaaaagagcgtgaaaacagcggccgccgccgtcattacgatagccggcaccttcatctccggtttgctctttttggcgctggcccttctgattgtcggcctgccgggcggattcaccgcattggtgctcgcggtcgtccttccggcggctgcgctgaatacgattgccattatcattatgcatccgattgtgcagacgatcttaaaacggtccaatatgattgaaacggtgaaataaccgcataccgaaacctcttccggccggaagaggttttttaatgtgtttcagcatgttttatacgagaagttttgtgaaaaagataaggaacaatgcgagggcggttcctgctgagcagacgatggccttttggcggacgacccgcttcggcggataagaagcggcctggccgagcagtttcaggtaataaacggcgcccgccgcaaagacaagagccatacaagataaaacaatcataaagacagacaaccttctccctccttttcccttaaaaaatatgctaaaataaagcaagctatgtatagaagtttattcttctgaacaaaaatgataaaagttatgagaaaaaaaacggggtgatttcaaatggctgacggacgttcccttttaacaggcctttttgtaggcggattgatcggaggcgcagcggtgttactctcggctccttcatccggaaaagagctgcggggcaaaatcaaagagaattgcaattcaattgaggacacaatcaaacggttaaaaaaagacggaatggcgcttaaggaccagcttgtccaaacggcgaaagaaagcgcagaagtcattaaagacgtaggcggagagcttcagaccagcattaaaaggtggcaggaggaaatcaaaccgcaccagcaggatctccagaaggaaatcgctgatattgaagagaaaatcagacagctggagaaaaccttacaaaactaatatcctatacaaccaaaaaaaagtgcggacatattgcgttccgcacttttttttgcggtttaaagcctttcccagcaacggatcaagaatttattataaaattcttaaattttcatctttattaatctttattttattggcataatagaggaaaagaaaatgtgaagcaggtgatctgtattgaatcgtgttgaaccgccttacgatctaaaagaagctttaatctatacccaaaaaatggcgcagctgtccaaagcgctctggaaatctatcgagaaagactggcagaattggctgaagccgtacgaccttaatattaatgagcatcatatattatggattgcctatcagcttaaaggagcttctatttcagaaatcgccaaattcggcgttatgcacgtatcaactgcatttaacttttcaaaaaagcttgaagaacggggatatctgaaattttccaagcggctgaatgataaacggaacacgtacattcagttaacagaagaaggggaaaatgtattcgaaagcctgcttgaggagtttgatccgtcgagaaacgctgtgtttaaaggctcacagccgatctaccacttattcgggaagtttcctgaggttgaagaattaacctgtgtcatccgccacatttacggcgaagattttatggagatattcgagaaatcattgacaaacataaacaatgattttgaaagtgaagacggaaggctgaagaaaaaaacggacgaatcggctgtccatgaaacggctgaagagctggaaccgatcaacagttaatcaaagtgcttcataatctcaataaattcttccatcagcgctgtataaagcccctgctcatacagagcaaaaatcgtttcatgaacatctaatttttcgttcagctgtcccgcaaaaagcgcaaggagcttgtcaaacgtcacaaagccttgcgctttttgcgactccagctcgtcctccaattcgcggcagatccgcccgacctcttctccttcttcttcggtcagccctttttcaatcatcatcgcataaaaagggtacttatccatatccaccgttttcaccagcaattgtatgtaatattctaaacgcccgatacgctgatccattgaatccatccgtttcacttctttctatctttaatcttattttagctgataatgaatggagaagaaaggttaaaccgtacatttccatgtttcaccgagctcttctgttcttctctttccaggtttatttttttctttaaaaaaggattgattttttctcctgaagagagtaaattattttgagattgtattccatctttgtacggaaggatgactctgatgaattgctggaaaaccattaatctgatcaaagattatggtgcggttcgtttattattgactgctgtaggttttatgatcctgttttttatatgcaacttcttggcattcgggctgctgcgtccgaatatcagtttaagtgacgggcacgtgtttgctttttgtgttctgctcgttgttactttatttgtacataaagtcatacatgtcctgccgatgatctgtaaaaaaagaaaaaaggaaatgaaaatgtacttcttacggatgccgacatggaaaggcataccgaaaacgacgatgctgatttcaacgatcagcccgtttttattcattacgccgttattgttttatgccggactggcatttccgagacacgctcattacttttatatgatttcgagcattcatgcggggtattgcctgcctgatcttctgtttgccctgcatctggtcaaagcgcccaaatcatgtctgattgaccaggaatccgacggttttgatattttagtaaaaaaagtgccggagtcttgatgtcccgctgatttttcaggttacattctatcttttttaataaatatttggtaatgtaatatgggagcagttcagagagagggggaatctcccatcattttattctattttatcgtggctgccctgtttattctttatttcataaacaggctcacaaatacattatgccttgtcagagagattcctgaagaccggcaggataaggtattccgttttattaatgtatctattttaattttactgatctcttcattcgtcgagatctcctttactgtgtaaacaggcaaaaaaatatggctgacggaggtctgacccccgacagccatatttttttcttaataaagccaagaagcgccgatgatgatcaataagatgaacagaacaaccaataatgcaaaaccgcctgcaaatacttcacccatctccaaaagcacctcctacaaaacgttttatttttccaattacatcatatgcaatttacttctgaaacgattaggcgcccgggtaagaaaacggaccgcttttagaaaaagcgatccgtttcgcttaacaaatgtaagctgcacctacgatgataagcaatatgaacagtactacgagcagtgcgaaaccgtttgaatatcctccgcccatggttcattacctccttttcatgatcaatatatttgtatgtatcaggaaaaagtttgactagacgaatgccctttatttaaaatctttttacagaaagccacaatatgttatgatacgcatatgcaatttaatttggatgattaggagtgtttaaaggaatgaagaaaatcgcgatagcagctattacggcaacgagcgtcctggctctcagcgcttgcagcagcggcgacaacgacgtgattgccaagacggatgccggaaatgtaacaaaaggcgagctctacacgaacatgaaaaaaaccgcgggcgcaagtgtgctgacacagctcgtacaagaaaaagtattagcaaaaaaatacaaagtatcggataaagaaatcgataccaagctgaaagagtacaaaacgcagctcggcgatcagtacagcgcccttaaacagcagtacggcgaagattacctgaaagatcaggtgaagtacgaactgcttgcacaaaaagcggcgaaagacaacatcaaagtgactgactccgatacgaaagaatattacgacggcttaaaaggtaaaatccgcgcgagccacatccttgtcgctgacaaaaagacagctgacgaagtggagaaaaagctgaaaaaaggcgagaagtttgaaacgcttgcgaaagaatattcaactgacagctcaaaagacaacggcggcgaccttggctggttcgataaaaagtcaatggatgaaacattcagcaaagctgcattcggcctgaaagtcggacaagtcagcgatccggtcaaaacaaaattcggttatcatatcatcaaaaagacagaagaacgcggcaaatatgatgacatgaaaaaagaactgaaagaagaagttcttaagcagaaattaaacgacaactcagctgtacaggcggcaattcaaaaagtcatgaaaaaagctgacgtaaaagtggaagacaaagacttaaaagacacgtttaacacctcaacttcttctgaatctaaataaaaaaactgtgcgggctctcggcgagccgcacagtttttttatgcgatggaatgattggagttttcttccgcatccccgttttcacttgcgggcgccgccatacggcgctcgcgttcctgttccatccgttcaatatacacccttccttctttttcaataaacgactggtcaagcttttcctcttctttagctgttgtgaaaagcttataagcgctgaaaataattccgataatgcaaaggtatacccaccaaggaaaaaatagcacgtcggtttcctccctttttcacccagagtctttattctaagctatgcttgataaagacaagttatgagagctgaacgtaaaaaagaccgatcgtaaaggatcggcctttttttcttattgatggaacgtcggtttgtagaaagaacggttttcaagcgcaaatacacgctctgtgtattcgcccggcttcacccgttccagcgctctgtccatcatgatcatttttgcatccagattgtcaatgtagtgaagaatttccgcttctttcaccatcggcggtttcgggcttccccattccgcttttccgtgatggcttaaaatcaaatgcttcagaatcagcacttcttcagcgtcaatctgaagctcttcggctgcttttgaaagctctgtcaccatgattgaaatgtgtccgagcagattcccttccacagtgtacgtggtggaaacagggcctgaaagctcttttactttgccgaggtcatgcagaatgactccggcatacagtaaatcccggtcaagagacggatacagatcggcaatcgcttttgccaggttcagcatggatactacatgatacgcaagccctgaaacgaactcatggtggtttttagccgccgccgggtaatccataaactcagccgcatattttttgaccagatgtctcgtgatccgctggatgtttggatttttcatttcaaaaatgtattgagtgacggtttccatcatttcgtttttcggaatcggcgccgtttccagaaaatcatcaatgctgacattttcgttctcgccggccggccggatgtttctcagcttaagctggtttcgtccgcgatagtgatggacatctccgatcaccttcacgatcgtctgcgccgcgtacgttacttcatcagtcggcttggcatcccacagcttcgcttcgatatctcccgattggtcctgcagcattaacgtcaggaatggttttccgttgcttgcgattcccttagtcgaagatttaatcagaaagtattgatcgacctgctcgccgacctcgtgcagcataataccttttgccattctattaaaagctccctccatatcttacataataccagtatagcacatacctcttttttgaaaataaactcttttatgacaggagccgcatgacttgtccgctgtgaaaagaccggctgacatgctcatggcaggtgaaataaagtatctgccgcccgccttctgaaagctgattcagcacatcaaacagccgctgcagccgctgcctgtcaaaatggacaaaactgtcatcaagtaaaaacggcagtgataccgcagattccctctctgacgcaagggcaaaacgaatcgccgcataaagctgctcgcatgccgcctgtgacagttcgcctgcagaaaacaccgttccgtctttccgcataaccataatggaatcatcagcctcggaaaaatacaatttgtgatagcgtccgtccgtaagcggtccgtataatgcaccggcggtttctaacagacggggaagcgtcacttttttatgccgctccattttttccctgataatgtgtctgaccgtctgtaatgcggcccactctttagcggtttttttcacgcgctccttctgcatttctgtctgctgttttaaatcggatacaagccccgaggactccagctgctcttgcttcaccgttaataaagcggtttgctcacggagctgggcgcttttttcctcaagcgtttttttctctgtttccttctgaacgactgtatgttcaagttcggacactgtgcggctcatgtacggctccagctgttttccgcctatgccggacaagtgcgttttgatttcgcgcagctgccgctctgtttcccggcggctttcagtcagcctggcgagttcacaaaagtgttcgcggttttttgcgcctgccgccatgaaaagctgtttgacctgctgttcgtagtaatgaacttcttcatttaattcacgcatttgctcttgtgcatgcagcagatccgtttcgagcgcctgttttcgttttgcttcctcacgggcccgttccgcctgcgccagcaaaacgtgcagtctttcttttacggacagctcccttccgtctgaaggactcagctttttgacccggtcctcaaatgctctttgcagcttttgcagcctgcccgcttcaatggtcagctcatgcttgttaaggatttcttttttgacatctttcatcacatgatatgcgtcaagaagatgggaaggacttcctgaaaaccccagttccttcataaaaagttccgcctgtttttcagacggcgccatttcggcctcccattcttcatattggcggatgactctttcatatgccgcttctttctgttcaagcacggcttgatccgcaatcagctgctgccggtgccggccgtcacgccaaagctcttcctgcagaagatcagccgcttctttagagatcgccggcttctttttcttgtgtccgggccctcctctttctgacggcagcggtttttgcatgccggacagcatatacagcagcagagcgccggtaaaaagggcggcgggcagccattcctttaacatagcgaaaatcgcaatgaacagaatgcccgcaccgagaaagagctttttttgtttggcgcgctgtttttccagatgctgaacatgtgcctgccattcgtttccttctgtatcagccgtttgcttatatgattgtaaagcggcttctttttctttcctgacagcggggtccaaaatgttttctgccgtcaaggcatgttttcgttcggcttcttccagctccagccgcgcttgttcgaaaatcgcatcaagctgtgtctttctttctcttgcctgtccggcgctctgcacggcttcctgcagccgccattcatattcataatcggtgttcagtgaaagaatgccgtcctcctcatgtcttccgagctgctgcaatcctgacgaaacgcgggcagatgtctgccggatctgtgattggatggcggcaagctgttcgccgcgcgattcgtacatatgctgctcgccggaaagctcctgcagctgccgctctttttgcagcaagtcctcatttggagcgagcagatcagcctgccgcctgagttcagccgcttttgcccgaagcccctcaagacgggccgctttcggatggagatgcgattcgtatttttcaagctgatgcattccgtccttcgggaattgcttcaatgctaccggataagaagaaagttcgctttccaaggctgtttttttgtctgcgagcggctttgcttctatcgccgattttactgttttgatttcttcagttatgtctttcaatcgtgcttcggcatcctgcaaacggccgccggcgctttttttctcttccagaaggctgtgatagcccgcttccgcagcttccgcctgtttcagctgggcgctgagccgctttaatgtatccaactcctgatttaagcgggggttccgcccgttcggcttatacatcctgtcaagttcttttgccagtcgcccgtcaagctttgccgccgcttccgacccgaataagctcgaatacaggagaaactcgccgattttgtcccggttaaaagcttgaatctcctgcagtccgaatacatcgaacgaatagatcgcttcgtacagcgcccggtctgtatcggagagaagctgtttgagccattctccgtccttgatttcgcctgaagccgtatacactctgactttttcggcagcgccttttgtccgttcgattttgacagcgccgtgatcgccatgcttcaattccacagtgccgccgtaaaccccgccgtttttcggttcgtatttttttgatttcggaaaaccgaacagcacgcttttgataaaggacatcaatgtcgttttgcccgcttcatttaacccgtagatcacttgcacgggagaatctgacagctgaaaacttcggtcggaaaattttccgtattggtaaatatgcatcgccgttattttcatctctgaagctccttcatctggcgtcttaaaacggcttgagcctgccgcttaatatccagtatctcttcatctgtaaatgaagccatctgacgccggtatacgggatgacgctcaagggcttcaaatacaccgctcatgtctgcgcattgttctatgtcctgaaggagccctttaaaaaacggatcgggcggcacggtgtctgtttcatccgtccgatcctcaagcgcaagcggccagacgaaacattcctcttcggcctcttcctcctgtaaagcggaaagaagctcctccgcgatacctgcgggcgcctccgtccaaaagcggggcgccgcgccgcgaagcaccagcctgacacatgccgggcggcccgccgcgcgcaagccggagaatgtatccgatgcggctttcagaagtgaagtcatatgttcagctccggagatatccagatcaatttcctcccataacacatcatgcgcttctttgaattcccaagacatctcaccgtttgccgcccggacgagataatatcccttaggcccggtttcttttaaatgccgggcttgaatattccccgggtaaatggcggcgggatgctgggcggacagaacctgccgtttatgaatgtgtccgagcgcccagtaatccatgccgcttttttcaaggtcttctttcgtaaacgggcagtacgggtcatgcccttccgctcctgataacatgccgtggagcatgccgatatgataaggcgcgccggtcattttccggtaacgggccgcctgattgaccgttacgcttctttcctgatagctgcatccgtatatgcttgccgcaagctctccgtttttaaagaaagatttttcctccggtgtatccgaggtgaagatatgtacattttccggccattcaatcggcgaccacttaccgcccaaatgatcatggttgccgaatatgacgaacacttggatatccgcttcctgtaatctcgtaaactgttttctcaaaaacagctgggcttttaaacttctgttggcttcgtcaaacagatcccccgaaagcagcacgaaatctgcctgctcccggagtgccccgtccgtcagtcggcggacgctgtgaaatgtgctttctttaatacgcgcatataccggttcaggcagattcgaaatgccgtaaaacgggctgtccagatgcaggtcagcggcatgaataaacgtcagatcagccatctcgccctcccctttctgcaaattgaattacccttattttagcaccgtttttatacgaatgcacgttctgtaaaataaaaaaacagcccggctgttccgggctgtttcacttattttttggagatgcgcagcgcttgtttgatcgctttgaatccgctggcgtttccgtaaatcaaaacgccgcctttgtaaattttcgcgccgaccgctgcaaagatcacgatagtgagcagtgtcagggcgattccggccgcagcctgccaaaacgggatatcgagcatcccgacgcgtaaaaacataatcatcggcgtgaaaaacggaatgtaagaggtaacggtaataaaaccggcgtcaggattgccgatgccgaacatggcgatcataaaacctgccacgactaaaaaaaccatcggctgaatcgtctgctgtacgtcctctatccggctgacaacactgccgagaaacgcggcaagcgtcgcgtaaagaaaatagccgagcaaatagaaaatgacagcatagactatcgtcgagacgggaacatccttaaaattgagaaatgcactgatcggcgacgacgcatcattttgagggttcagcttcagtgagagataaccagccgcaatcagcaccgcaaactgtgtgatccccacgagcgcgataccgaacagtttggcaaacatctgctgaatcggcggcatgcttgaaattaaaatttccatgacgcgggacgatttttccgtcgccacttccatcgcaatcatgcttgcgtacatgataactgagaagtagatgacaaacagcatgatgtagacaagccccattacctgaccgagctcttcctcagatttcgcccctttttccagcgcgtctttgctgacttccggcggagtgtagaggctgctgactttttctgccgaaatgccgagcttggcggtttcgacagcggtttttgtctgggttaaagcctgcttgagcagtttatacgctgattcatcagaaatggtcagcgctttgtatgctcctgttatcgttcctttttgatcttgtctgatgataaacagtccgtcccattcaccgtctttgacacgctttacggcatctttttcggactccttcgtctccattgcctgcagatcattgtctgtatccgccgctttaagctgttttgcaaacgccgggtacagcccgcccgtttcatcaatcaccgcaatttgctgcttgccgtcatccgattgaaacacggatataatcgattgcagattggtcaccgctaatactaataaaacggtaatggcggtcgaaataatgaatgactttgtcgcgattttgtttttatatgtatgaaacagcataatccaaaatttattcataaacggcccccaccttttctataaaaatatcatgcagtgacggctcttccaattcaaacttccgtataaaacctttcccttgcagcgcccggaaaatatcctgagaaaccggttcattcgcgacctgcagtctgattccgtcatttgtttccttccatttcacgacgccttcatgcgtttttaaaaagctgaggtcatcatctgaatgaacggtgacattttttttgccgaaagaccgcttaatgtctttcagattgccttgaacgacgggttttcccttctggagaatgcacaaattctcgcaaagttcttccacatgctccattcggtggcttgaaaaaacgatggaaacgccgctgtttttcaaagaaataaccgcttctttcagcagctcgacattcaccggatcaagaccgctgaaaggttcatcgagaatcagcagttcaggcttatgcaggacggccgaaatgaattggattttctgctggtttcctttcgacagctcttcgactttcttattcttgtaatctgtaatgccgaaccgctcgagccatgtcatgagctctttttccgcctcttttttgcccattccttttaatctcgccagatagacaagctggtcactcaccttcactttcggatacagcccccgctcttccgggagatagccgattttttcactgatggaataattgaccggctgccctttccaggtgatatgcccgtcagtcaggcttaaaagacctaaaatcatccgaaaggtcgtcgtttttcccgcgccgtttgcgccgagcagcccgaacatttccctttcaggtatttgcaggttcaaattgtcaacagcggtaaagctgccgaatgttttcgttacgttttcaattgtaagcacgaatccaactccttccttgacccattatatactaataatgggtaaaaattaatggaggattttaaattctttatcagaatatcattctataaagggggtgacatgatgggacaatatgtattgaccgcattccatgcgtcgggagaaacgctgctgaatgaacggatcgaagcggataatgaggcggaggcgaaggccgccggagaggctttattgaaggaaaaaaagcttgagaacagtactcatcgcttggtaaatgaagccggaaagctgattttattccacagataacagaagctttccggcttctgtattttatcggttaaattgcggcgtccgtttttctaaaaaggcgcggatgccctctttatgatcatccgtttttctcatattttcctgggcctttcgttcaagagacaaaacatcttttaaccggctgatatggaggctctgataaatagccttcgtttcaatcatcgctgacagcggcgcatgcagcaatcggtcgatatacggttgtgccccctccgcagggccgccgctgaacagcccgtcggcaagcttgagccgcaccgctttttcagccggtaatttttcaccgctccaaatcagttttttcgcttcgatctcaccgacgcgtctcattaataaataatggcctcctccatcgggaaccaatccgatgccgatgaaattcatcgcgaggcgggcgttttcttcagcgagcaccacatcggcgcacagcgcgaaactcagcccgagccccgccgcggctccgtggatggcggctatcacaatttttttcatatcatagagcgtcagcgtaatggattcgatcattttcatgagccgttcatattctcctgaatcatgatcagacgtcatcatctggatatcaccgcccgcggaaaatccccggccttccccccgcaagaggacgataagcgcttcgctgtcggctgccatcacgcatgcgttttccaattcccggagcatttgttcattcagcgcattgtaactgtcaggccggttcagcacaatctctgcgatctttcccttttcttcatagcgaatatactgcatgtttacatcctccttgaatccgcttacatattttgttcaaatgatatattccttccgccgaagcgaaattcctttatttttcaaggtcaatagataccgaaaaatgcatatcatttgaaactgaacatacatttttatatagtgaaattgatatacaaaacaaaaggggggaaaaacgccgataatgaaatatgtgatactcagcttgttactgagcttttttatggtgctgttccccccttcggatgtcgctcttccttcccaattggtgacagaaacagacagccatgtacaaatttcggtttacccgcaggaaacggattcggcaaagacgccggttcacaccaaaaccgctccgcaaggcctgtcaaaaggatacggtgcgttatcccggatgatctccctgttatctgtcaaacctcttgatcaattcattgattccacaatggaaaggacatgcgccattccgatacaataccagtcaaattacctccggcatcagacaatttctcattgccaatctgtatttacgatgtaaaaacagtatattccggagggattttttatgaatattaaagaaaacgatctgcccggcatcgggaaaaaattcgaaatcgaaacgagaaatcatgaaaaaatgacgatcatcattcatgatgacggcaggcgggaaatttacagatttgatgaccgcgaccctgatgagcttctggcaagcatttcacttgatgatgcggaagcaagacagattgccgcgattatcggcggtatggtgtataaaccgcaggcgcttgaatcgattgaaatggcgttcaacgatctgattatcgaatggtttaaagttgaaaaaggggcaaaagcggcagggcggacgctcggcgaactggatgtgcgtcagaactatgacgtgacggtcatcgccatcattaagcataaccagaaaaagcttttaaacccgggcgctgattcgctccttgaagcaaacgatacactcgtcctctcaggtgaaagaaagcatctgaaaaagctgatccaagacttcctctccagagacggagtgtgatctgtttatggaccatctcgtatttgaagtcggtacggcgttagttcttgtagccattgcgagtgtcatcgccaataaaattaaattctcgatcatccccttcctgatcattttaggaatgctcgtcgggccgcacgcgccccaagcgggcatcattgacctgacgtttatcgaaagccgggaagtgattgaatttttcggacggatgggcgtcctgttcctcctcttttacctcgggcttgaattctcggtcggaaaattagtcaaatccggacgttcaatcgccgccggcggaacgatttatattctgattaatttcagtttagggctgatatacggctttatcacaggcttttcctttttggaagtgcttgtattggcgggcgtcatcacgatatcatcaagcgccattgtcgcaaaggtgcttgtcgacttaaagcgcacggccaatccggaaacggagctgattctcggcatcattatgtttgaggatatctttctggcggtttacttatccgtcgtttccgggcttgttctgggagacgcgacgtctgtcggaggcgcgctgatgtcaatcgtgatcgctttcggatatatgctgctgtttttcattgccgctcgaaaattgccgcctctgctgaacaagctgcttgatatccgttcaaacgaggtatttgtcatcgtcattttcgccgcgctctttttcattgccggcttttccgaaacgattcatgtcgctgaagcgatcggcgcgctcttgctcggactcgtgttttcggagacggcccattctgacaggattgagcatcttgtcgtgccgttccgtgactttttcggggccatgtttttcttcagcttcggtctcagcattgatccgttttcactcggagatgcggtatggcttgccctcggcgccgttctgctgacgattgccggaaactttatcgccggcatgatcgccgggcgccgggcggggctttctcataaagcatcgtccaatatcgggctgaccattgtgtcacgcggcgaattctccattatcgtcgcaaatctcggcatcgccggcggcctgtccgcttcacttaaacctttcgccgccttatatgttttgatactggccatcttcggccctttgctcacgaaagaatcgaagcggatatatctcctgttgaacagcgtgttcaaatggaagacgcctgaaaagaagccgcagaaatcataaaaaaaactgacctcttcataaggggtcagtttttttgagcgggaagaaattgctgaaaagccgtttttttattaatggagaaatgctcttttcccagaatggtattgatgattttttggtttctgtaaacagacagcttcaaattcgtagcgcccgttccgtgagcatgatcaagattcgttaatgtgaaaaaatgatgccgcctgtcgtccttaaagacaagacgggaatcggccgtcactttaaaccgtttctcatcctcccattcgatatcgggggcaattgccgtaaaccattccggaatatgaggtttaaagccggtcgccaaaatcactttttctgaatcggccgtaaaggtttcatccatctgccattgatgaaagctcagtacgcagcgcccgttttgcttttcaatttttttaagctccgccatcggctgaatatatacgtcaggcgaacctccgctgatcgatctgtgatacagggcatcgtaaatggcggcaagtgtgtcagaatcaatgccgtggcgcagtccgtccagctcagggagcgtgttcagccgttctttaaaaggcaggcggttaaaatattccacataatcaggtgtaaacatttcctgtccgagcttggcggtttccaattctcggaatccggcggagcgtgtcacccattgcagccggctgcggcggtattgttcatcgtgcaataagtcagaaaagatctccgcggcgctctgtccggagccgaccactgtaattgattcggcgccggcgagctcgtctttccgaaacaaatattccgtgctgaccatcgtgtcctgacgcgcttcggcagcaatctctgcgggaataagcggttcagaccccgtccccatgacgaaatgcttcgtttgatagacactgatgcttccgtcctcaatgttcttgacgctgacgtcataatgtccgccggcatttttcacgccgattacctctgagccgaaacggcatgatttgatttctgaagccgcccagctcaaatagtcgttaaattcccgtctcggaatatcaaattcattaaacgtataaaaccggtacagccggtcatgttcatggagaaagtttaaaaacgtgtagcggcttttcggatcggcgagcgtgaccaagtccgccagaaacgccacctgtaaatccgtccctttaattaatagaccgggatgccacgcaaattctttctttttatcgaaaaaaagagcgtctgttccgggtatatcctctaacaatgcggcaagccctaaattaaacggcccgattcccgctcctatgacatcatacatattatgcacctcttgcgaataacagtctgatggtcttttcccgtttttgcagacggttaaacataaaaaaacggcacgctgattccgtgccgtttttgatattataatgcagatttgacgaacatctcatctaagtatttgattttctcttctgtataatgctcgaatcggtcattatatgatttcggatctttcggattggcgaagtgcgtgatttttccggtttccggatgaatgaatttgcttgccgcgccgcagccgataccgataatcgtctgcacttcttccataatcataatgttgtagatgctttcctgaccagggaaggagtagccgacattttcaaggtttccgagaatgtttttctgccggtacaagtagtacggcgtatagccgtgctcttttgtccagcggacggcgtcatccatcatgcgggacacttcctgtctgtcggcaactttatacttatgcttgtttctcgtcatttctgacgcccgtttaaaagaaagcgtatgaacggtcaaagattcaggcatcagcttttccgtttcctcaagactgtgcctgaactcagccgtcccttctcccggcaggccgatgatcaggtccatgttgatgttgttcatgccgtgtttgcgggaaagatggtatttttcgatggtttcttcaactgtatgatgtctgccgatggccttaagcgtttcgttttcataagattgcgggttgatgctgattctgtcaatcttatacttatttaaaacggccagcttctcctccgtaatcgtgtcgggacggcccgcttcaacggtaatctccctgatattcgcgacatccgggaaagagcggaccatttcttcatataaaagatccatttcttcagcggtaatgcttgtcggcgtgccgccgccgaaataaatggtcgtcactttgatatcatgccgcttcagccattctccgattttctgcatttcatagtgaagcccccataaaaaggagccgactcttcccgcctgtccttgaatggcataagccggaaacgtgcagtaggcgcattttgtcgggcagaacgggatgccgatatatatgctgacttcatctttgacccggtacagatcgggaaccgcagcgagctggcggtcgacgatctcctgcatcagattgattttttcatcatggatcagataatcttttttcagatcggcatgcgcctcttcttttgtcaggccgctctgcagctttttatgaagaagtttagtaggcctgatgccggttaagattccccatttttgtgtcatgcccgtatgcgattgaagaagatttaagtagacatatgacagcgtatttttcacctgtttaaatacttctttttcgctccatccggcaagaagcggtttcgtatgatgttccttttcgccggttcctttgatttctccggataccgacacgctgtctgcatcttgagaaatggcaagtgagatgacgagatcagagggttcctccgtttcgccgtacgcaagaacacactcttcaaaaaataaattcgcgatgttttgcagcggacgatgcagcctctcatccgtgatgccgtctatttttatttgcaatgtgatcaccttatttttcagattcaaaactttctttagtgtacagaaagaacaggctaaaatcaatccgcgaaaaagccgcagaccggcgtttcgcgtctgcggctcttgattacggccgtttcatatggaacttatcgagaaagcctttgcggtgctgcatgcggaaatattccttaatcatataggcgactccctgttcatcatttgaccttgtcacccagtccgcttttctttttaattcatttgaggcattccccatcgcgacgccgagaccggccagctcgatcatcggcagatcatcttcctgatggccgatagctacaacctcttccattgaaagcccgagatcagcggcgaccatcgaaagtccgctttcttttgaaacccctttaggcacgatgttcagtttttctccgttgacgcggatcacatcgacggccgggaatgctttcattatcgtatccgttatatcagcctgcaggccatcttcggcatgcacttcaatgacgggcgctgaaaccggctcatcaaggagcaggtcacttaatgattcgacaaactgcaccggataaaaaatcgggtcagacggatgaatcatcgttttcccgaccagattggagttcactttcttcttgtttccgatcgaatatttttcgtgaagaagccggatattgcatggatagctttccagcacctgaacaatattaaacgtatgatcttctgatattttcttttcaaaaaacggctcatctattttttcagaaatgtatgcgccgctgtgggtaatcaatttcgcattcagctttaatattttcgccactttttgagcggagcgaaaatggcggtttgtgaccagtgtgacgtaaattccttttttcttgacgtattcgatggcatcctttgtcgtctgatgaagtttgccgttggagcgaagaagcgctccgtctatatttaacgccagcatttgttttgacacagagaagtccccctccttgatgactgtacttgtcattaggatatgaccctgtctctttgtttagaacaaccttttctccgcagcaaaaaagcctgcctcaagcagactttgaactgtcgttttgttgggatacgatcgatttgctgccttctccccaatgtgtatttctatttacgaaatatatcaggaaccccttatttgaccgttgatgcgctcgtttcacttactctctgttgctaccccttaacataccaggcagtataggcgaccgtatccttagatcatctgtaagtgtaggcgctttcagagttattatctcaattatattgttaaaaaacaagggtttttttaactaaaaaaatcagaggaaatatctatgctgaatgtatgataaagttgaaagagaacatacattctcatataataaaagaaaaaaagcggtgactgtcatgtctctattaaaagatatttataacgaagaatttgcagaagcacttctgaacagaatcaaatcggcgtatccggcttttgagcgggacaagtgccgggcgctgatgtttcaggaagattggcccggactgacgttaaaacagcggatgcgccggatcacagactctttatatgaaacactgccgaaggattacatacgggcgcttgacgtcttatatgagacagctccccacttctcagggctcgccgggattatttttcccgattatgtccaacagtacggaacggatcactgggacgaatcaatgaaggcgcttcagtatttcactcgtttttccacttccgaatttgcggtccgcccgtatatcaggcttgaccgggagcggatgttcaaagagttcctttcctggacggagcatccggacgaacatgtcagaaggcttgccagcgaagggtcaagaccgcgcctgccatggggaatctccattccggctcttcttgacgatccttctccgattctccctgttctggaccgcttgatgcaggatgactcgttatatgtcagaaaaagcgtggcgaataacctgaatgacatctccaaaacacatccggatgttctggcacagatcgcagccgagcggttcggaagctgtccgcacacggactggattttgaagcacgcctgcaggacactgttaaaaagaggagacaaacaggcgcttgcggttttcgggtttgaagacgcctcccggatttcattggaacgttttacattgaattcggaaacggccgccatcggaacaagcatacatttttcttttcagatccgctcatccgcccggcaaaaagtcagggttgaatacgcgattgattttgtaaagaaaagggggcaccgcagccgcaaggtgtttaagatgtcggagtccgccatggataacggagacgtaaaagccttcagcaaacaccattcccttaaagatttaaccacccgcaagcattatcggggaattcacactctgtctgtcatcattaacggaacggtaaaaggttcgcttgatttttctgttgaataaaaaaacccctccatttcatagatggaggggtgtggagcttattccgggctgccgtaaagctcttcaagaggtttcataatgattttgtttaactcgccgatcagcatgctcatgcgctgttccgcttccatcagctgagaaatcaattcatgctgctgtacgagagccaccgttttttgtgcctgctctacctcttcctgagtgatttcttcacctgacatctgtttctgctgcagctgcagctgtacattgcggaagttatcaaacatgcgttttgcggattcatctgcgtttacttgatcataaagccctctcagacggctgtattcatcactgtttcgcaaagctttttcaagatcatatgctgcatcataaaaatgaactgccatagtaaccgctcctttcttcctttcggacataccactccactataacagactgcggagcgactttcatcatcggcgtatgttttccttagaaaagaatgacaaacaaagcctgaattgctccgattatcccgccgagcagaccgcctaaatacgttatcatcttaaattctctcttggaaatcgacagcaccatttcctccagccgttcaacgggaaactgatcaacctgctctttgaccacttcctcaagacgcagccgtttcagcacattctccaaatgagcggcaatactgccgagtgccgcatcaagcagcttcggcgcgtacgttcccgtaatctcaccttcataacgggagatgatgtcaccgagccggcattcgaaaaagggcgcggtttgaagtgcggccaaagcccgctttttcatgctgaacagcagatctttcgcattccacttttcatcggcctcataaagtgtataagatttgagcttgccccattcttgagaaagcagatcagccagaagctttttcgtttcctcattgcgcaaaaactttaacagctcaggcagcacacggtctgccaagcttgaattgccgaggaacatctgcaccatgctgccgagcatcccccgggaattcaaaaagtcgtcaatcatatttccgagcctgtctttcccttcttcactctcaaaataatcaatgctccgcttcagaatataatctgcggccagcgggactttttcatccagcttttcctgaagctcatcaggaagccagtcttttatggcgcggtgctcatatttccggtacagttccgaaagcttttcatcggtaaaacggtcaatccaggcatccgtcttttcctgcggattccggatgcccgcggcggccaaagcttcgtgcaccgtcatctcggaagcggccattttttgcgtgaattgttcggcgaaaagaagcgcctggtttttaacggtatctgataaaagccgcttttttattccttccggggttaaaaggtggttcgtcaccatgagccccatttgttttgccaattcatcccgtcttttcgggatcagccccggcgtaaacggaacccgttttccgaacaggtaatacggccggtacggacgaaataacatctgaatggcaagatgattcgtcaccgcgccgatcgcggctccgatcacaatcataaatagaaacgttcctgcaatgcccattccttttcttctgcctccatcttatgttctattttcttgatgatatatctattcgtattatagaggctggcgggcatgcgggcaaatgaagaacctgaattgttgtttgtgaggaataaggcaagatgctgtttcgtactctttacagtagatcatcttttatgatgcgcttagcatatttattggatggaagggccgttccatcagcggctttttgaataaagggggagtaataatatgacaacactcggttttatgtctgtatcccgccggcacgaagaagattacgccggggaattggctgaaagagcgcctcaatataatgtgcgcttagcccgctttacaccgtttgatatatttccggattctttgcgcgtgaaagcgctcgtctatcacccgcaaagcggaaagtggaacgaaacggaaatcgatattcccgaatatatttacgaccgctgtttttacggaaaatccgctgaagcgcaaaaagccaaaccgatcgtcgaatggctgaaaaaatatcggaaaacggaatttatcggccgggggcttcctgataaatggacggtcacggatgcgctccaaaagcatcatctgatcagtccctatattcctgaaacggccgaagtcagccgctatgaacaggtgcaatcatacttagccaaggaaaaagcatgtatacttaagcccgctttcggcgcgggaggcagaggcatcatcctgcttgaaacaggcaaaaaatcaattacggccacttactatatcggaaaaaacaaacaaacaaaatcattttccaatcacgtgtcttttaagtcttggtgcaaaaaagtgctgcagcaccgctatttgcttcaatcctacttaaatatccaggataaagagcggcatccgtgcgacatccgcattttcatgcgcaaaactgagtcaggcgtttgggaaacggtcggaaaagcggtcagaaggggttatcagaacggtcttttatctcatttgcccggaggatctgaaccgattaagtttgacacatggtttgaggaaattccgagaaagcagcaggccgttttattggatgatgtcttttcgatcacccaatccgtcccttatttccttgatgaacggttcgggccgctgtttgagctggggctcgatatttgttatgccaaagacggacgcatctggcttttggatgtcaactcaaagccgggacggaaagctattttaagcgtggctccggaggcgaaagaggatttgtatacgagtccgctgagacgcttccgcgaacttcagtcacaggaaagccggaaaggagtattaccgcgtgaatcataaagggatgattgtcggcatcgataaaaaaagcaaaaatacgctgtttctcccctcctccatgaaacgggaagggcttttatccgctgccttcgggaccaaggttgtcaaatgccgtgtagccttttctcaatcacttgaaaaaagcgcgctcctttctgaagatttgttcgaggagctgttgataccgcataaaagccgggctgactttctcatacacggccagacggtgcacatcggaccgctgatcggcgttttcacagccgggttcacatcatcgccgtcccgcccgttaagagaccgtacagccttcttttccaagatgctctctcttcatgaacaggcgaacggatattgtttcgttttcggggcccatcagatcaactgggaagaaggcactgtccaagcgctgatttataaagaaaacagctggaaacggacggccgtcccgcttccgaatgtcgtatatgacaggctcccgagccgaaaaacggaagaagttccgcttttacagcagacaaaacaaaggctgatgaatgactatcagattccgtggtttaatccgcaattctttaataaatgggacattcataagcttctggaaaaaaacagtctcaccgcttcacttctgccaaaatctgtcctgcacccgaatgcagaagcgttagaaacgttatgcagcacgtttgacaccgtctatatcaaacctgcagacggcgcactcggaacggggatttacaaggtggaaaaaacagatgccggcttatctgtcaaacacacgaatgaggaaaaaacggtggtgacggcagagtattcagatgcggcatccttcatgacatcatttaaagaaaacaatgacccgtccgcatttttaattcagcaaggcattgacctgatccggctggatgggcgccccgtcgatttcagggtgcacacgaataaaaacgccgaggggaaatggacagtgacggccattgcggcaaaaatttccggtgaaaacagcatcacgacgcatctcgcaaccggcggagaagtcaggacgttagctgaattatacggcgatccgagagagagagtcggcatgatgcggaaactttcaaaagccgccttggcggtcagccgcgtgttaaatgagcacattgaaggttttatcggcgaaatcggttttgacctcggcgtcgatcattcagggaaagtttggatgtttgaagccaattcccgccccgggcgcagcattttttcccatccgaagctgagatcggtcgattacctgacaaaacggagaaattttgaatacgcgtcgtatttatcagaacggtccatcaccgccccggaaaaactttggcggtgaggctgtctttttttaggtttacccgggacaggcattgaacgatgagctacaatgaacaagatcaacatttcccataaggagcgtgaacgtcatgatttcgcacttcagctggaaaccgttattcaaaaaagagaaactgcccggatggcggatttcattttactggcagggtacgcattacgaagggatttaccacaagtcaggagacattgaatggggacacacacatccgggaaaagaagagccggctctcgtaaaagagctgcatgaattaatgctttatcacatatatgactgaaagctaaaagctcagccgcaccaggctgggcttttctttttccttccgctatttaccacaccgttttccgaatgagatgccgtttgattcaccataatacgtagtacaaagcggcaaacagcattgggtgaagccgagctggcaatggttttcgttccgaaaatcatcggctggtgcaattccagcaaacccaaccatactactttataaaggagatcatacaaatggcaaacaacaactcttcaaaccaactagtagtacccggcgctgctcaagcaatcgaccaaatgaaatacgaaattgcttctgagttcggcgtaaaccttggcggagaaacaacttctcgtgcaaacggttctgtcggaggagaaatcactaaacgtttagtatctttcgcacagcagaacatgggcggccaaggcgtacaataactcaataaatggcttacagaaggcgcgggataccgcgtcttcttttatgccgtcacccttttttcctattccacataccctaggaaaaaaggagggaaaacatgtcattcattgcctcagtcaattgggagctgattcagttcgtaagtgtttctttggtcaatgaatatgttgcccaccatttcccgtttattcacaggtattcttttccccgctgctttgaatgatataatgagcggcgaggaggttttttacatgaacatcgctttactcggagcaacgggaagagtcggacaggcttttataaaagaagcgcagaaacatggacacatggagatattcgctcttgtcagatcagccggaacagtccttcccattcctgaaaaacaaatcataacagggaatgcgaggcggcgggaagatgtaagccgattgatttccaaagcggacacagtcgtgagctgtctcggcacggacggtgacgataccctttcaaccgctatgacccatataatagacagcatgaaacggcatcatgttcagcgtctgattacgatcggcaccgcgggtatccttcaatcacggcttatgcctgatcaataccgttttgaatcggcagaatcaaaacgaaaatcaacaagagccgcaaaggaacacgcccgcgtatacgaaatgctgctggcagaggatcttgactggacgatcatctgtcccacctaccttcctgacggagatgctgccggagtttaccggttcgaacaggatcgccttcctgaagacggcgctgaaatcaccgtcggagacacggcgcactttctgtaccgtgagctgatcagcccgcagtttgtcagaaaacgggtgggactggcttactgaatgaaaaaaagggcgaatctttgattcaccctttccgattacaccgcggacttcgccgttcctttctgcaattcatacatttggtggtactgccccttttgcgccattaattcgtcatggcttcccttttcaataatgcggcccttttccagcacgagaatctggtctgcgtgtctgatcgtggaaagccgatgggcgataataaatgtcgtgcgtccttcttgaacgacttgcagcgctttttgaatgactgcttctgtttcggtgtcaatgtgcgccgtcgcctcatccaaaattaaaatggccggatcgaacacaagcgctcttgcaaaagaaatcagctgacgctggcctgaggacagtgtgccgcctttttcggtgacgggctctctgatgcccttcggcagggattgcagaagacttgcggcgccgacttggcgaagcgcttcttccgcctgctccaaagaaatacgctgatcatcgagtgtcacattggagccgatcgtgcccgagaaaagatacgggtcttgcagcacaatgcccatatgcgacctcagctcctgcctcgacatgccgtatatgcttttattatccagcaggatatctcctttttgggcatcataaaaacggaacagaagattcaggatggagcttttgccggaccccgtatggccgacgagggcgaccgtctcccctttttcagctgtaaagctgatctgtttcagcacctcttccccctttcgatatccaaaagaaacatcgcggaattccacagttccttccgcctttctgtctgcgggagcgccttcttcttctgtttcctcctcctgtaaaagctcgaatactctggcggcagagacacgggccaattcaagcttcgaaaattggttgacaatccccgtaaccggctggaacaaacggtttaaataatcaacaaatgcatataaaacaccgatcgaaacaattccggccgcactcagactcgcgcctccgaaataccagatcagcccgacaaacgccagattgcgcaacacattgacaagactgtgggacatgagggaatttaaggacagcattttgtttttgtagcgaaaatgagcttcattcaattcttcaaattccttcatcgtttccttctcgcggcggaacgcctgaataatcggcattccttgaatggactcgttcattttcgcattgatgtcactgttaatggaacggattttttggttgaagacggatgcgtatttgcggtacacaaccgaccagatcattaaaatcggaataatcagcaggcaaacggcggccagcctgacgtcaagcataaacagcgccgtaaaaatgccgagcatataaacgccgcttgtgataaatgtcgacagcaccgttacatataaatccctgaccgcttctgtgtcattcgtaatgcgggccacgacttttccggcaggcagattatcaaagtagcggatcggcattttctgaatgtgtgaaaatacatcctgcctcatgcgctgtatgatccggttcgctcccatctgcagcagataatgctggccgtaatgaaaacatacggaaaacatgagcagtcccgcgtaaatggcggtcagcgtcagcaatccttttatttcgggacggtaaaattgaaaaatctcctgtcttgataacgtaatggcgggatatgacctgctttctttaccgtttgatattgtcagccggccgtcagacaccgaacggtttccgtcaaaactgacgggacggtcaacaaaatagtagcccgcaccgacttgataaatgtgcgcctctccggttttgtccgcccccggtttgagccggtcctccctgacataatcatgcccccggaacctgacggcgcccggatcgtccgcagaggctttaacccatgttttttcaatgccgagaatgtggtcgtcaatcattttttttccgataaacgggccggtcagctcagtgccgaccgcaataatgagcaggacgaccgcccatatcagcagcttcttatattgaagcgcgtaattccataatcttctcccggtcttcatgcgcccgtccccccttcttcaagagaggacagctgctgcctctcatattgttttcgataccagccgttctgcgccaacagctcccggtgcgtgcctctttcagacacccggccttcatccatgacgagaatgagatctgcgtgttcaactgccgagagccgatgggtggtgataatcgttgttttatgccgccgttttttacggatgctgtcaatgatggcggcttccgttttcgcgtctacggcagaaagcgaatcatctaatatgagaatgtcaggatcggtcaaaagcgctctcgcaattgagatgcgctgcttttgtccgccagagagcgctacgcccttctcgccgaccagcgtctcaagcccgtcggaaagcataccgatatcgttttcaaaatgcgcgtctttcagcgcgctgccgatttcctcttcgtttgcatcctgccgtccgtaaagcagattctcctttacagtctttgaaaataaaatatgatcctgcggcacatagccgatccacccgcggagctcctcaagcggaatcccctgaatcggaacacctgtaaacgtgattgctcccgcgccgggcggatattcacgcaacagctgcttaatgatcgtcgtctttccgcttcccgtcttcccgacgatgccgagtgtctgccctttttctacggaaaaagatacatcagaaaccgccggtcccgctccgctcggatacgtgaaagtcacttgttcaaaaacaagacgcccgggctccttgatgccggcggggtgcttgggcccgatcacgtctggctcataggaaagcgtctcattgacacgatccaaggaggcatttccgcgctgcataatattgattaattctccgatcgcaaacatcggccagatcatcattccgaggtacacgttaaacgataccagctctcccagcgtcagccggttttgaaaaacgagataagcgccgtagccgagaccgatgagatagctgaggccgacgagaagtttcacagtcggttcaaaaagtgaatcgataaacgccaccttcatgtttttctcatatacatccgccgtcatatcaccgaaccggctgacatcatttttttcctgcacgaaagcccggatgacccggacgccggataccgactccagcaccttgtcatttaatgatccgaaagcatcctgcgcttccgtaaaccgctcatggatcttttttccgtacaggctgaccgcagccgccattatcggcagcggaataatcgcggcaaatgtcagcttccagctgatgagaagccccattgtcaaaaatatcgtcagcatatacatcgttgaatcaacgagcgttaagaccccgaagcccgtcgtcatactgacggcctgcaagtcatttgtcccccgcgccattaaatcgcccgttctgtatttctcgtaaaacggcggtgacatttgaagaagccttcccatcagctttgaacggagaatcttctccatgacattcgccccgccgaaaagctgatacatccaaaaataagacagtaaatagacggctgccgttaatgcgagaaatacacatatgtaaaacagcatcccgctttttgtaaacacgcccgccttcatatcgtctatcgcgttaccgagaagtttaggcggaaacatttcaatgacattcacaatcaataacagaacaatcgctgtcgtatagcgcagccaataggctttaaaaaaccacgcgagcttttttaatacagtaaacaaatactgtcatcccctttcatcaatcagccgccctcaagcttttccggattgtttttcattgttttcgctaataccgccacatgcatcacacctgtctttctttcatttttttgtataaaaaaagacatgaagcctcagctccatgcctcttattattataaataaggtacagacccgccgtttatgcgcgactgccccgtttttaagcaaatgttcagaaaacggaagctgtatgggagtcacgccggtattcagctgaagatgagttgacaagctttagttttgacatgatccatacctcctttttccctatattgttccttcatcatataaacaaatcctttttttgtcaatgcaggttttacatttctgccattcgggtattgtaaaacaaaccttttttactgaaaggatgaggccgatgtttcacgcggaccggttgatagcagcttttgacggaagtgatgatagtaaaaaagcgctccaaaaagccatagacctttcaaaaacatttcacgcggatttaacggtcgtacattcccacaatgcaaaagatacccggacgattgttgatccccccaggccgggagccggggcaacgtatatcggcggcgggattgcaagcgttcctgacccgctccaggcggaaagaatctcccctgatccgatgatttatgaagaccgtacggaagaaatcgttgcggaagcgagaatgctgatgaacgacagccagattgacggggatatcgacattttagaaggtgatcccgctgatgccattatcgagcatgccgaccgtatatcggcggatttgatcgtcatggggagccgggaccagaacaggctgaaaaaacttttattcggaagcgtcagtgaaaaactgtcatcgaaatccgatattcccgtgctgatcgtaaaataattctttctgtaaagcagcttaatcaaaagctgctttttttacagctcccggctgtttcttctttttttcggcatcacaaaaaaactcgccatgatcaaaaaatcgatgcacaatacgacagaccagccctttaacagcttgctgagcgcttcggtgcgggaagcgtcctgaatgagaaataccgttccggctaaaagaacgccgccgatgacaaatgctaatacatgtcttccccatccttttgcataatgtttggcataatccagcccgtaccgcttgaccggttttgccccttccttgaccacataatagcggaaccgctcatccgcccattgaatcatgcttttcccgaaggcgacagacactccgatataaatggccgccaccgcatgcgccatagtcgccgccgcccctctgtataaatcagctgcggccgccagaaacagtacggcatccaataaaggaatgagagcgaaaaaaaacattccgagcttttgccgcctgaatatatagcgcgccgccaatccgaagataacagccgcccaaaaagcagcctcacaaatgacaatcaaccaagcaatcgcgttcaatccggttcccccttatcgttttctaaaatgcattgtatcactgctttttatttaatacaactgtattacaaaattgcaagaaaaaatatttcctgttacactggaaccatgcctaaaataatcgatcatgaaaaaagaagaaaacaaatagccgaagccacttggcggacgattttggagcggggaatggaaggagcgacagtgagaaacatcgcccaggaagcgggtctttctttaggcgcgctgaggcactatttcaccacccaggatgagcttttagggtatgcgatgacactcgtaaaagaaaaagcggccgccagaattaacgaagttgccatgaaagatctgccgccgaaagaaaaagcggtgcgtctgatgcttgaaatcatcccgacagatgaagaaacgatggctgaaatggaggtatggttcgctttcacagcttatgccagacataagggagaagagtttcaaccccagcaggacgggatcttggcatatatccgcggtctgattgactggctggatgaaaataagcttctgaaaccgaatcttgataaagagatcgaagcggagaaaatgtacgccatcgccgacggattggcgctgcatgccatgcttgaacctgagcgtctttcaaaagagaagatctcccgtgtgctcgttcagcatatcgaatctctttttatctgactgaagtaaaaaggccggatgtgttccggccttttttcagcttatgactgaaccccgagctcctgctgaatgtgcgactgaaaagcctcctgaatcgttttggctacaggtcccggcactccgcttccgaccggtttcccgtcaagggttacgatcgggattaattcagccgtcgttgacgagatgaaaatttcatccgcatccctgagttcgtcttcggtaagagccttctcccgcacctcaatatcgttttctttcatcagctctaacagtttcatccgcgtaatgccgtttaaaatcagctcatttgcaggatgcgtccggacagtgccgtttatgacggcgtatacattggaagaggttccttccgtgaccgctccgtcccttatcagcaccgcttcataagcgcctgcttcataggctttttgtttaatcatcacattatacagtaaattcagactcttaatgtcacacctcagccagcgtttgtcttccgccgttatggcctgcgctccggctttttgttcattttccggtttttttactgaaaaggtgtatgccgtcgtctgcggttccaatccttcgtcatactggtgcttccgcggcgccttccctctcgtcgtctgtatatagaccccgccgtcaatgagtttgttttcctgtacgagcttttgcagatcccattctatgtcctctgcggagaacggcagggtgatgccgatttctgcggcgcttctgaaaagacgggcaatatgctcacgcagaccgaataaggcgccgttatacactctgatgacctcatacacaccgtcaccgaattgatatccgcggtcctcaatatcaactgccgcttcttcacgatcaaccaactggccgtttactaatgtcttcatgtaaaccctcctcatcgttatctgccgtgatgtgcattctcagctgttattgtcaactattctatcatactgaacgagccggctgcggagtttatttttttcttaaaatcttattattcgacatcttttctatgtcttttccagttttgttcctgtatacttgattcgacatacatatgctgttaacttatggcacttcgcaagcctccgctgttatcggcattatgcagaaacttatgctactggagagattgttatgcgcaacacaaaagaaggtgcttccccttctctgttttcattggcttttaaacttacgagtttagcagttttgtgcggactgcttctggtaatcgtcataatgggatattccgcttccgccgcaaaaaacaaacaggtcaccgtgaccgcaaacgggcagcttcgggatgaagcagaaagcctgcggctgaaaaatgattctcccgacatcttaatgaaacatttgcagagagagcgtgacccagggaaaaaaacggtatatttaaccttcgacgacgggccgtctccatatactgaacagctgttgaatgtattgaaggcaaatggcgcaaaggccactttttttatgcttgaaccgcggatgaaagcctataagcattccgtgcaaagagcgaagcaggaaggaatcgcgctcggcctgcacggcgtgacgcacgataatcacctgttttatcaaacaccgacatcaccgctgaacgaaatgcagcagggacgcgatacactcgaggcaatcaccggagtaaaaacggatcttgtccgcacgccttacggcagtaaaccgtcattgacggatgcccagattaagaatctcgaaaaaggcggattcgtgtactgggactggacgatagacagtgaagactggaagtacaaaaacacacggtacgtgccggaagtattgaatcagctcgcatatttggaaagcgttcatacgagcaggccgcatgtcattttaatgcacgatctgcctgcgacggtgtacgctttgccgagcctgatccaaaaactgaaagcccagggctactcctttgatgttttgacggatcaaatgattcccgtccatgaataagaaaagccggatctgtatatgatccggctttttttatgtcgcggcgctgatccgttttgcaaattcaccgatcttctcatggatgacaagatcaaataaatggtcgcaatatgtcggctcaaggttaatgatcacctgcttcaaaccgggaatccggcccgcatcctcagggacaaaccttgccggcgccacttcaagcgaagtgccgatcacaagaagaagatcagctttatcaagcttttcataaagggtttcaaaatgctgaacgagatcgccgaacagcacgacatccgtttttaatacggtgccgcataccgcatgatcaccgatttccgccgtacattccggcacttcgtccttcagcagatgagaaagcccgtagcgcgctccgcagcgggggcatgcggcggtctgaattgaaccgtgaagctcatagacactgctgcttcccgctttcttatgcagcccgtcaatattctgcgtgaaaatgtctgcctgctttccccgcttttcaagatccgccaaatacgtatggccggcattcggctcatagcttccgctcattttcatctgaaagagctgtttgaatttaggccagaattcacgcggacggcgttcaaagtattccctgctcatcgcttccattctggatgtgtcttcggtccatataccgcccgccgaacgaaaatcaggaatgccggattccgtgctcattcccgctcccgtcagcaccacgatacgttccgcctgattgatcaatgtcataaacgcttccactcttccaccgccttttctttttatcatatcatgaaaaaagaacggcgcctgttatgcccgttctttttctccggaatgatccttcacatgaaccggatcatcgtggcttttctgttttacgaatacattctggcccggataggcgaattccacgccttcctcagcaaaaatatcaataatccggcggttgatatcctgccgcacgtccaagctttccgcccagacgatggtctttgtgtaaaagttgaaaaacagattataatagctgtccgcaaacacgtcaaagttaaccataatcgtatcatcatgcacgccttcatgttcacgaagcatttctctgagccttgtgatgcaccgctctaaacgatcaatcggcgtcgcataagaaacacgaacggaaaacgtgacctggcgcttcgtcatcctcgtccagtttgtgatggcttccatggacagcgttgaattgggcacggtaacaagcgccccctgcgccgtgcggaaccttgtgcttcggaatgtgatatcttcaacgccccccgttacagatgacgtctcgacccagtcgccgatcgtaaacggcttttccgtaatgatgataatgccgccgaaaaaattactgatcgtatctttagccgcaagcgcgaaggccaatccgccaagtccgagtccggccacgaacccgtttacatcataattgaattcctgcgcgatcacactgacgctgagcgcgagaatgacaaagcgcagcaccttggataaaaacggcgccaaaatgtcatccatatcaagctcaaagcgctgattgactttatgaaataaaaacgaagacgccgatgtcagattgcaaagcccccaggcgatcagcgcaacgatcagagagcggtacaattttttgacaatgtccatctgcccgtctaagaacggcgaatactcaatcgccaaaaatagacccagcgccacgaaaaaccatctggccggcttgtcaaacgctacggcaatctgtttgaatatgtcggttttcggcttgttcgccaatttgtaaatgagctgaaaaaagtatttgacaaacagttttctcaaaacgagaaaagccgctaaaattccgatgctgatactgatctgcaaaatatggtcaagcgtaaaaaagctctgaaattgtgtcatcatggcatatgctcctttgtcttgtcgaaaatctattatactaaaacattcggacatcagcttcttttaatgtctttaggcagcctgaaaaaccccggcatcagagcacagccggggtttttcacacattcgttcatctttcagccagatacaacagggtcaggcactatttcttctttgattgtgtctgtttcaggagagtcgctttttggatttcagcatcggtttcggccttaattctttcttccactttcaatctcccttttcccatgatctcgcctcctttttgccattataaatcatcactgcggattgtaaaccgaaaaaagcactatctttattccaaaaaaatactgtttcgcacattcaccagtttgaatcgctgtgcatatacgaatctgatataataacagaaatgcccatgaggggagctgacaagcttgtataccatcgctcatcgcggcgcatccggttacgcgcccgaaaatacatttgcggcatttgatatcgctgcagaaatgaacgctgatttcattgagcttgacgtccagctcacaaaagacggccagattgtcgtcatccatgatgacaaagtcgaccggacgacggacggctccggttttgtaaaagattttacgctgaagaagctgcagtctctggatgccggcagctggtatggggctgagtttaaaggggagcggattcccctgctcgaagaggtcttgaagcgttatcattctgaaatcggttttttaattgaactgaaagggcacgtttctcaagtcggtcttgaaaaagcagtcggccagctgttaagcaggttttccttttccatccgccctatcgttcaatcattcagcctcaagtcaattcagacctttcacgacatgtatccgtccgttccgactgcaataattgcaagacccagcttcgggatgttttccaaaagccagctggccgcctacaaatcagccgtaaattatgtcaatattaaatatacccgcctgaatcggttcttgatttccaccgctcacagacacggcctgaaagtatttgcctggacggtcagaaatcaaaagacggccgaaaaactgcaaatgatggcagttgacggcattgtaactgattttccggattttatttctaaggatggctgatatgaaacaatacatcgcaatttttatcggaggcgcgcttggcgcattgctccgctttgaaatgagcgcgcacattcacagcggttctttcccggcggccactttcctcgaaaatgcggcgggaagccttttactcggtcttattacgggttatttcatcattcgggctaaacgccctcttttgaccgcctttttaggaaccggtttttgcggaggtttcacgacgatgtcaaccttcgcaaaagaaaccatttttctgctgcaatcgtctcccgcatcggctttttgttatgctgccgcgacattattcgctggtcttgcccttgcatacgccggcattttctggggacggcggattgcccttcacgcagcgggaagggggcatgatacgccatgacgattgtcctgatgcttatcgcagcgggtatcggagcggtattacggtctctgctgggtaaaacaatttcagaaagaacaaaaggttttccgatgccgcttggaatggctgcggtcaacctgctcggctccttcggcctcggcatgttcaccggcctgggtctggataatccttccgccggcatcatcatcgcgacgggctttttcggtgcgtttacgaccttttccacgttcagtattgaagccgtgcagctgatgatgaacaatcgcataaaggaaagcctgctctacatcgctgtttcagcagccggaagccttttggcgttctggtgcggctttgttatgatatccatttaaaaaaaccttgagcttatttttcgctcaaggttgcgttatgaagcatgaccgtttcaggcacggggagctggcggtttattgttccctgaccgcccgggcggccctgttcttctttgagttcaagctgtttaataaaccggccgtccatttctaatatgagggcagtgtatcccccgatttgtatcgactcacccgcacagatgtcaatattccgtttcagcacaagaccgccgatcgtgtcgacttcctcttcaatccctgcgccgagaagatgattcacctgatcaatccgaacctttccgtccagcacataatggcgttcggacagcttttgaatctgcggctgttcgtcctcatcaaattcgtctctgatatcgccgacgatttcttcaagtatgtcttcggtcgtcacaagaccggacgttccgccgtattcatcagacaatatcgccaaatgaatccgttctctctgcatttttatcagcaggtcgtgtatcgggatcgtctcgatgacttcaatcaccgggcggacgtaagacgtgatggatacttccgctttttcatcttctgtcataaacagcagatctgaaaagagatgcttcgtattgatcatgccgatgacactgtctttgtccccgtccgttacgggccagcgcgtatatttgtctttcagcatcatctcaagcatttccggcacgtccatatcagtggaaacagccgcgatttcttttctcgggatcatgatttccttggcgatccgattatcaaaatcaaaaattttattcacaaatgtatattcagacggattgatttctccgttttttaaactttctgacagcaggatccgcagctcttcttcagagtgggagccttcatgctcagatgccggctttaatccggccaaaccggtcagaattctcgcggagccgttcagcacccaaataaacgggaacatgaacacgtaaaataaccgaagcggtccggcaatccataacgtcagcttttccgctttttgaatcgcaaccgttttaggcgcaagctcaccgacgacgacatgcagaaacgtaatcagcccgtacgccgcagcaaaagcaatcacatgctcagcagaatccggcagccccatgccctgaaacaaaggatgaagcatccgttcaaatgcaggctctcccagtacgccgagcccgatggatgtgagtgtaatgccaagctgcgaggcggataaatactcatcaagatccgtaatgatacgctttgcgagcaccgcccgtctgttcccttctgaaatgagctgatcgattctggatcttctcactctgacgatcgcaaattcactcgccacgaaaaatgccgttaacgcaatgagcacaccgattaaaatcaaactgtcaatatcgtccatttcaccttatcccgaattgaaggataaggacgtcacctcctgatttcatcgttttttcttaagcgagaggaacgaaatggatgattgactacacagagggccccatcctgccacctcctaagtcaaagcatgattgtcatttgtatagtttattgtatcacaactccattctttcatcattttcagatttttatcatataaaaaacagccttcaaaaagaaggctgccgttatctgcttcggaaatgattttctaaacaaagcgccgtattaatccccccgaatcccatgcttaagcttaacgcatggtgtacggtatgggcgctcggcccgtcggtcacccactgaaatgaatcgtcaatcggctccgttaagtttcggatcggatgaagcttgttttcccgcatttgcaagagagcagcaatgatttccaccgttccggccgcactcagaccgtgtccggtaatcgattttgtcgcattaatccgcgcgtgcgacaggccgctttcagaaagcgcccggcattcagtcttatcaccgatcggcgaaccggtgccgtgcgggttgatgtaatcgatctcttttgctgaaagaccggcccgctccagcgcctggcggatcaccgtcatttcgccctctgctgaaggattcgggttgcggttcgcatcggaagccattccccagccctttaagccagcccacgatcgtgcgcccctctcttcggcacattcagcgcgttccagcacaatcgccccgcacgcctctccgaatataaacccgtccgtatgccggtcaaacgggcggcaggcggcttcaggccgttcagcgtatgtatcagtgcccatcgctcccaaagaacggagagcatgacactccatgtacgacagatcggccagcgccccgatcacgatgcaccggtcaaacaggccgcctttgattccttgagcagcctgaataaccgccgcctggccgcttgccgacgcgccgccgaccgtaaaggccggcccttttatcccgaattgctccgtacaaagccccgacaaatcactatccataaaagaaagcccgtatgtcggatttacaaattgcggcgtttcaccgtttttctcaaaggcctgcagcaattcgcgctgcgtcatattcgagccgccgatgatcagaccggtgcggctgtgatcagcgccgtctaattgagcgtcatgccacgcttcatataaagcgataagcgccgtctttcctgataatgcggcccttcggtacaagcgcttcgacagcgcgtccggcggcgttaattcgctaagctccgcgccgataaacgaactgcctttctgccggccgggccgtttcatcacatcaaaggcgtgccgcccctccataagcgcatcgagaaacgcctccttgccttgtccgaccgcggttaagactccgattcctgtaatgctgatgtctgacgtgccattattactcctcgacatttgtccgttctcccatctttatgtattggaagctatgaagaaaaatcttgatacagtgctttgaaaatatcgcgcgactgtctgatctgttctgaaggcacgctgaaagataatcggaaatagccgctttttccaaatccgctgccgggtacgatcaatagtttgtatttctgtgcggcatgaatgcagaacgccacctcgtcttcaatcggtgatttcggaaagacgaaaaagcctcctttcggcatttcaaattcgaagccggcttctgtgaggatgtccaccataaggtctctccgctttctgtaaggttcagcgtcaatcgaaagatcatccattttcgccacggcacgctgcatcatgaccggagcgttcacaaagccgagcgtccggttgcagaaaacgaacgcatccgtcagaagatcgccctcaggcatttgggcgtctgccgcgatatacccgagcctttcccccgcaatgccgagatctttactgaacgaactgactaaaatcacgcggtgatacgcctgaaacggattcgcctgctcttctccgtagatcagctggctgtacggttcatcaaataaaataaatatgctttggccgttccgctcttcggcttcttttaataaggcgcccaattcgttaaggtttttctggctgagcacagtccccgtcggattatgcggcgtattaacgatcagtcctttcgtacggggggtgatcgcacctttaaccgcttcaatatcaatctcaaatgagtcagtcagcgggcagatgacgggtctgccgcggtaattttcaacatacgctttatattccgcaaaataaggcgcaagaaggatgacttcttcctcggggtttaaaatgcttttcagcgcgacattcagcgccccgccggctccgaccgtcatgactgtatgcctggcggaaatttctgtctgaaaccgctctgacaaaaagcgcgcaaccttttctctcgcctccggaagcccctggttttgtatgtatccgtgccgccctgtttcagccgcttcgcaaagcgcctttttaaatgtttcaggcggctccgcaaccggatttcctattgaaaagtcaaacaccttatcggcgccgaactcttttttcagccgagcgccttcatcaaatagtttgcgtatccatgaacctttctccagattctgtgtcacttcccgtgataaaccggccactgtcatctgtcccttctgtctttttcttccgtttctatttacaatgattatgaaagatttacatggcgcagtcaacgctttttcagacagcccgccgcgccgtttcaggagaaagacggaaaacaataaacttgtgcaaactccccttcatatattaaactattctcataactataacgtgatggttggggagggatttagatggggctgagacttatcgcatcagtgaattagcagagcttgccggtgtaacgaaacgcacggtggattactacacaaacctcgggcttttaaagcctgacaggtcttgttcgaactatcgttactacgatacacttgcacttaatcggttaaagtttatagtcgcttgtaaaaagcagcgattggccctgtctgatataaaagatcgactggagaaccagtttccctcttcagccctgcctgacgatattggaaatctggcatcggaaattgatcacatgaatcaaaacatctccgtgatcttgaatcggtttgaaaagcttgaaccagaggagcgcgcccagctgaaaaaaaggctggctcctgaaaagcttgcagtgcttcaatcatttatgctgctgttaagttaaaccattatcttactaacaggaggtgttaccttcatcttcccaaaaggagtgaaggttctaattggacattgtgaatttgattttagtcgcggttttaatcgcgctgacggcatttttcgtagcatctgagtttgcgataatcagaatcagaggctcacgggttgaccagcttatagcagaaggaaataaagccgcaatcggtgtcaaaaaagtgaccacgcatttagatgagtatttatcggcgtgccagctcggcataacattgacttccatcggtcttggtgtcttaggcgaatcaacgattgaacgcttgcttcatccgcttttcacaaagataaacgtaccaagctcattatcgcatattatttcatttattctcgcctatgcgatcattacattcttacacgtggtcgtgggagagttggcgccgaaaacagtcgccatccagaaagcggaagccgtttcaatgctgttttcgaaaccgctcatttggttttaccgcatcatgttcccgtttatctggcttctgaacaactccgcccgtcttttaacgaaggcgttcggtcttgagacggtgtctgaaaatgagcttgcccactctgaagaagagctgcgcatcattttatcggaaagctataaaagcggtgaaatcaaccagtctgaatttaaatacgtgaacaaaatctttgaatttgacgacagacttgcaaaagaaatcatgattccgcgtacggaaatcgtcagtctgccgcatgatatcaaaatttctgaaatgatggacatcattcagattgaaaaatatacccggtaccctgtcgaagagggtgacaaagataatattatcggcgttattaacattaaagaagtgctgaccgcctgcatcagcggcgaagtatcagtcgactcgccgattaccgattttgttaatccgatcatccatgtgattgagtcggcaccgattcacgatctgcttgtaaaaatgcagaaggaacgggttcatatggcgattctgtcggatgaatacggcggaaccgcggggcttgtcaccgttgaagacattattgaagaaatcgtcggggaaattcgtgatgaatttgatatcgatgaaatcaacgaaatccgtaaactcggcgacggccattacatgcttgacggcaaggtcctgattgatcaagtgaacgaactcctcggcatccatttggaaaatgacgaggtcgacaccatcggcggctggttccttacccagaaatacgacgtcgaacaatacgactcgattatcgaagaaggctgtgaatttatcattaatgaaattgacggccaccacgtcgcatatatcgaagtgaaaaaactggcgtttgatgaactgctggaaaccgccgaacaaaaagaagcataacaaaaaagcttgcgcgtctgatacagacggcaagctttttttcatttacagttgttcaagttttttctcaagctctttaattctggcattcagctcttctgtcatggccgcaagcctctccttcggcgcaagatcggaaaagtcctccaaaaaaatcggctcgccgatgataagccgcatttttccctttttaaacagcgcttttcccgtagacggccctttatatgcggccggaacgagcggcgcttttcccatttgggcgatggtcacggcccctcttttcagcgggacgtcttctgatgttctcgtaccgctcggaaaaatcccgacaatctttccttccttcagaagcttaatcggcgttttaatgctgctcgggcccggattttcacggtcaaccgggaacgcgtgaatcttcttcaaaaaacgtccgatccactttttctgaaacagctcttttttcgccatataatgaatctgatggggcaatatcccgacaccgagcgtgaggacgtccacccagcccgcatgcgtgcacgcgataacgaatcctttatcagacggaagattctctttattgtacactttcactcctccgcgcagggatagaatgcatttgatggcatttgcacaaaacttatacataacgcacttcctttgttgtaatgatcaaaagtgttctctctctctattataacaatattttttattacctggtactaataattatatttttcctccgccgatctctatcttttatgacggattttgggtactatagagaaatggtgtttgatgaggtgaaaatgaatttaagccgtttgcatggaacgtgcaactttaaacctttcttatgcgtgtataacatagaggggagaaaaggcagtgacgatcgatgaaatttaccaaatgtatatgaatgatgtttaccggttcctgctctccatgacaaaagacaagcatctcgctgaagatttgctgcaggaaacctttatgagggcatacatacacattcactcctacgaccacagcaaagtaaagccatggctttttcaagtggcgagaaatgcgtttatagattatgtcagaaaacataaaaaggaagtgaccatttccgatgacttaattgggagccttttccagacggctgttcaaagcccggctcatcagattgaaatcaaggaagtgctgacagggtatatgtccgaacttcccgacaattatcgggaggccttaacactgtattatttaaaagaactgaattacaaagaagcatcccatattatgaatatttcagaggctaattttaaaagtgttttatttcgtgccagacagcggctgaaagcactttataatagaggtgttaatgatgaatgaagaatttaaaaagcgtttttaccaatacaaaaatggagaaatgagcgaccgggaaatggccgcctttgaagaagagctggaaaagctggaagtctatcaggagttgattgaaagcgaaatgcaggacgaccgggaatgggacgtcggcatcagcccggaaaaacagaaggccattttatcatacggaaaacgcaaatcgtatttgcggatttcagttctcgccgtcatctccactttgatgattttgccgctttgcacattaggaagctacctctattacggtctggggggaaaagaaagcaccggcaatcaattaatggagaccgcggcagtgacggtggcgaccacaatgccgaacgtcctcgtcgatacctccggactgaaaagccaggtgaagctgtttggaatgaatacggaatttccgctgcaaaagcagatcggcacaaaaacgaaatccgtcggcggagaacggattgaaatgtttttagatacggtcaaatcgcctgccgttaactactatgatctagacgcggcacaggcaaagcattatttcgcccatccttccggcttaaaggaacgcacgattgacaaagccggacagacattaaaaaaattgcctgaaggaagcgtggcggaggtctatctttcttatgacagggcctatccttcttctcaaatatattcgacttttaaaaaatacgatgtgaagtttttatggaacgcggtcgaaacggagaaaaatctgaaagacagtccttatgccgagccgttaggatttcccgggaaagattccaagatggtgtcctctttcgaaacgcaaggacagacagaccgtgaacaatttatcaatgcccttgaatttatgtcccgccataaaaaatgggcgcatgcaatatcgaaacgcaaagacatgaatcttggcagccgaatcgactatgttgaacatcacggaatgaacgtatacggctctgtcgtgacggggccgacaaaagaaatcgaacgtctgctgaaaaacaaaacagtaaaagcagcaaacatcggtgaggtggaattatggaattggtaagaatttttaaagagcataatgttttcggctggatatcagtcggtaccgcgattttgtcgctgctgcttttgaacgtggcaatcatcagcaatgtgactttctattcttatcagatgctgccgtttgcgatggccgccgtgccgttcggcatcattgagctgtttattaaaaaaggacggacgggcccgggactgctcggtgtcattctcaatctgttcgtcattgtctgtgtatatacgatcgttgcggttgatacgaatctgcaattcggtttttaaacataaaaacaggcccttttacgggggcctgtttttttaaaatgaaagaacgccgattaaatgcagcaatacgacgatgatagccagcggcacgagatatttcagaaggaaataccacacctgaaagaaacgatagccgatggcggaaccgcttttcatctcggcaaacagctcctgcttcggtattttcagcgggacgaagattgatattaataaagcgccgagcggaatcagcacattgctgacggtgaaatccgcaagatcaaaaaacgtttttccgaacaaatgaacatcaccgagaacaccgtatgataaacaggacggaattccgactaagaaaatgagcagaccgcttgtccacgacagcttctttcttttcgtttcatcacctttcccgacagtcgccacgataatttccaccatcgaaaaggccgaagtcagcgcggcgaagaaaaagaccgccaaaaagctgataaaaaacagcgagccgaacggcagccggtcaaacacagccggcagcacggtaaacagcagtgtaggcccttcatccggtttaaagccgaacgaaaaaaccgccgggaaaatggccagtcccgcaaacagcgtaacgagcacattcatcataacaatggaacccgccgaacccggaagattttgggttttcggcagatacgaactgtatgtcaccatgaccgaaacaccgagcgttaatgtaaaaaacgcctgtcctaaagcatataggatggattccggcgtcaaatcttcaaagtgcggaaccaataaaaatctaatcccctcaacggcatgatcgagcgtgactgatcgcagcacaagcaatagaaacagcacgaataaaatcggcatcagcaccgcactgacacgttcaatccctttctgcacgccttttgcgacgaccgccaccgtcatgatcataaatacaagctgcgcaatgagagtctggatcggattttcaatgaccgtcccgaacaccgtgccgtactgctcctgagtgagcccggataaagaaccggtaacggcttttaacacataaagcaaaatccacccgccgacaacactgtaaaaagacaaaactaaaaaacaggccgccacacccacataacccgtgaggtgccataccgacttcggcgcggcttgtttgtaggcatcaatcgcatttgtctggctccgtcttccgaaaataaattcaccgagcaaaagcggatagcctaaaagcacggtaaagaggacgaatacaagaaaaaaagcgcctcccccgttcgtacccgctacgtaagggaacttccaaatggctcccaggccgatcgccgaaccggcagcggccataataaatcctatttttgaggcccattgaacccttttttggtcagacacgactttccacttcccttccgccctatattatcccttattcgctgcgataacttaagcccatttcaatatgtttcattattccgaaaaataaaaaggagcggcgggtgccgctccttacaaatccccgtttaatttcgaatgctttctcgaatataagaaataaatcaccagaccgatgatcagccagataaagaaacggaatatggtggttgcgccgaggttaataatcaaaaacacgcagaacagaatggacaatatcggaataaagggaacccccggacatttaaaagcccttggcagatcaggctgtttctttctcaatacgataaccgccacggaaatcaggacaaatgcggcaagcgtgccgatgttcaccagcttcgccagttcatcaagcgggacgagcgagccgagtaatgccgacaggatgccgaacacccacgtcaccacgtgcggcgttttatgcttcggatggacttttgaaagcgcccccggcaccaaaccgtcacgggacatggcaaacatcaccctcgtctggccgtacagcatgacgagcatcaccgttgtcatccccaacactgcgccgatatcaataattccggccacccaattctgtccggccatctgcaggacgagagacacgggatggtcaacgccttcaaagcgggcaaacggaacgacgcccgtcataatcgccgatacggtcacatacagcacggtgcagacgattaatgaaaagataattcctttcggcagatccttcgccggatttttcgtttcttcagcggcggaagagacggcgtcaaaaccgataaaagagaagaaaacgagcgccgcggcactgaaaacaccgccgaaccccatcggtataaacggctgccagttgtgaggtttgacatatacggccgcaacggcgataaacaatagaacaaccagaaccttcaaaatgaccataatattattgacccgcttcgattccttaatgcctaagtagagaaggaatgtaatcgcaagcacgataacaaatgcggggagattaaagaatgtgaccgtgcctttaatagatcccggcgcggccgttaatgcggtcggaagatgaatgccgaagcccgccaagaatgattgaaaatagccggaccacccgaccgaaaccgcgctgacggcgagcatatattccaagattaaatcccatccgatgataaacgcgagaagttcacccagtgtcgcataagtaaacgtgtagacggaacctgaaaccgggacgcttgaagcaaattcagcatatgacagagccgcaaataaacacgcaagagcggcgatgacaaatgaaacggtcagccccggccccgccgtgacagcgcctgttccggttaatacaaaaatccccgttccgatgatggcccctatccccagaagggtcaaatcaaaggcccctaactctcttttcagcgacttttccccgctcgttgcggcaagcaggtcctgaatgcttttctttctgaatacgctccccttcatctgcttcactccttgtaaaccaatatatgttagaatattcagataacaatagcaataatgactaaattcttatttttcgcatgaaatgtttcagcacatcattcctttctcctatgtcatattatagcgaaaaatataaaaatgaaaataacttttttgaaaattctatatattatttttagttttcataaaacagaactcagcggattctccactgtgaaatattaacattagtgattcagctggcgacttccattttttgaaaatcgtattcatatgtacgttcaaataaaaatcccgccctttttaaaagcgcgggataagacttgcgtattatgttgaaataaatctgccgccatttacgtgaatggtctgccccgtcatataggaagattcgtctgaagccagaagcacgtaagctccggcgtgttccgcaggctgtcccggtcttcccatcggagtgtccaaaccgtgcttttccaccttttcttcagtaaacgttgccggaatcagggcggtccagatcgggccaggggccaccgcatttactctgatcccctgatcggccaatgacatcgccattgaacgcgtaaaggaaacgatgccgcctttcgtgcatgaatagtcgatcaatgatgtgtctccctgataagcggtaatagacgttgtattaatgatggcgctccctcttttgagatgaggcagcacggcttttgtcatatgaaacatagaaaacatgtttgtacggaatgtcttctccagctgttcagctgtaatatcaagaatcccgttttgcggatgctgctcagccgcattattaacgagaatatctatttttccgtagtgatctaagacttggcggaccgccttttgacaatgcgcctcatcaccgacgtctcccggaattaacaggcattcggcctggtattcttccgcacgctttttcgttctctcggcatcggcatgttcgtctaggtacaggatggcaagatccgccccttccttcgcgtaagcgatcgcagccgctgcgccgatgccgctgtctccgcccgtgatgacggcgacttttccttttaatctgtccgacccttttacatccgggtcctccaagaacggtttcggctccatgtctgattcaataccgggctggcgtttttgcacctgcggcttttgtccttccgtctgtctgtccatcggattcatattctcacactcctgcaattggtattactgagacgataccacgcagtgcggggagttaaacggacaaatatgccggtaattaaagctgctgagccgtttcgggaaaagcgccggtgtatttcgcagacggcctgtaaatcatgttgtcagcggactgttcaagcacgtgtgcgcaccagcctgccattctgcttgctgaaaaggtcggcgtaaacaaatcattgtcgacatcaatggcctgcatcacagccgctgcgtaaaactccacattcgtatacagcttccgtccgggcttatattgctctaacaggcggatggcttccttctccacataaagcgccaagtcaagcgacggatcatttcccgccacttcttcagcctttatgcgcagcgcttccgcccgcgggtcttttgttttgtacaccctgtgcccgaagcccatcaggcgttctcccctcataagcttcgctgccaaatacgcttctgcattttcttttttcccgatgtcttcaagcattttcgtgacgcctgaaggcgcgcctccgtgcagcggccctttcatcgtacccagtgcggcagtgacggcagacactaagtccgattcagtcgaagcggtgactctcgctgaaaaagtcgatgcattcatcccgtgctccatcgccagaatcatatacgtttcaagcgctttcttttgggctgcggacggctgcctgcctgtcagcatatacaaatagttttcaacgtgtccgtatcgcgcctcaggtgacaacgcttcctgcccttgtttacggcggtatctgtacgcaataatcgtcggtgtgacggcaatcagtttaatcgcttcttccggcttgggcggatatgtaaatgaatctgtgcccaaacctgaaacagccgttctcagcaccgccatgtcgtccatttcatccggaagcgtttccagtaagtcgatcaaatgtttcggaagcccgcgctcggctgcaagttcttcctgaaacgcaagcaattgccgctcatcaggaagcgccccgttcaaaatgagatacgccgcttcttcaaaactgaattgcagcgcaatatccttcgcatcatagccgcgatatattaaatgccccttttctccgtcaatgtggctgatagccgtttctgcacaagtaatccctttcaatccacgataaatcaatttcattcccccttatcctctttctgttattatagtaaatataatatttaaaaaataatgaatatttttaagggaattaattaaaacttttaatcagaggagtgcatctatggattttaaatggcttcacaccttccttcgtcaccgcggcaaaatatgagaatttcagaaaaacggcggaaacgctttttttatctcagccgaccgtcaccgttcatataaaattattagagaaagaaatcagctgcaagctgtttcagcgaagcggccgaaagatacaattgaccgaagaaggaaaagcatacgtgccgtttgccatgaggcttttggaagactatgaaaacagcatggcggagctgcacagggtgcgccagggctactcgcacacgctgacactcgctgtttcgccgcttatcgccgacaccgttctcccgtctgtcatgaagcgttatacagaggacaataaagaaaccgaaatgacggtcaccattttcgaatcggaagaaatcgcctctcaaatcagaaacggctcagccgatatcggactgagctgcttaaaggtgcaatcatcttccctcacttgccgctccctgtacaatgaccccgttgtcctcgtcgcgccgcccggccgaaaacccggaacagggaaggccgatgaagtgaaagacctgttcggacaatatctgcttttgacccataaccatcctgactattgggatgatttgctccgccaggtcagaatacagttccctttcgtcaggacaatgaaggtgacacagacgcatattacgaaacgatttattaaagaggggctgggtgtctcatttctgccgctgtcagcagtacgggccgaactcgccgcaggcagcatgattgaaattccgtgcgaattcgcccagatgccgagcgcgggcgcgtacgccatcgccctctatgaaaatgaaaaaaagaaaacctttttagattttttatcacattttcatttttaggtgaaacaaatggagctctgtcccgtctaaataaaaaacccgttctgatgaacgggtttctatcgctgctagaatcttttcgcgccaaggtagcgcggtttccagtagctgttattcagatcacttgttgtgacgccgtcagaaccggcatggatgaacttgttgtttccgatgtacacacccatgtgtgaagggccggcctgatatgttgtaaagaagacgaagtctcctcttgacgggctggacacgctcttcattgagctccagtatcccgcagtgctcgttctgccgacactcgtctgtttgtttaacaggtaccagataaatccgctgcagtcaaagccggaagtcgttgttccgccccatacatacggcgtcccggttaaagattgcgcatcagaaatcagcttgtttacattcaggctcgtctgtgcagcattatggctggatgaaggctgctttgatgacgaagatcctgaagacgttgaaccggaagttgatccctttactttaagaacttgtccgatgcggatcaggtccgtttttaaaccgtttaaactttttaattggtttaccgtcattttatatttattcgcaattttccaaaggctgtcgccttttacgactttatatgtagacgatgatgacttgctgcttgagcttgaacctgaggatgatttaccgttaatcgaaagcgtctgaccgatgtaaatgatatccgattttaatttgttctcagatttaatggaattaattgacgttccataccgatttgaaagtccccataatgtatcgcctttttttaccttaatcgtttgcgcagatgccgcgcccgcaaacaaagtcgtccccaaaaccactgccgttgttgctgtaacaagttgctttttcatattttcctccctgaatgattctatctattttatgtgtctcttttttaaagtttttatctgtttcctattataaggttcaatttccactagaaatagacttgacttcccgtgacaaatttcttactaattcgttttagaaaaaagtttttaagggtattaaatatttcaatttgatttcaaacgtgacgaaaaacgagtctatttgtcatgtttttttcctgtgatcctcgtattttggaaaaacaaagcagtttattttccaaataaccccttgttaaaaaaatcctcgactttttcaaaaaagtgaatggttttcactctttcttgaaaacataactttacaccggaatttacatttctaacaatgtttcacctgaaatttacaggaggaacaggcgctctttacaaacaccccctaccattagacatgcagacacgattaaaggaggacgagtgagaatgagtctatttaaacaggttcgatcaaaacttctgccggcggcagccgtatccgtgctgacagccggtctgattgcgggcgcggggcttcagcactccgaacaggctgcggcaaaaaaacagcctgacaaaaacgaaatcagaaacgtcatcttcatggtcggcgacggaatgggcgctccctatatgaacgcctaccgttcggtcattaacaaaggaaagccttcggatggtatgaaactgacggcattcgaccccaatctcaccggtatgatgatgacttaccctgacgatcctgattccaatattaccgattccgcggcggcaggcacggcaatggccacgggtgtgaaaacgtataacgcggcgatcggagtcgataaaaaaggaaagcgggtaaaatccgtcctcgaagaagcgaaacaaagagggaaatccaccggacttgtcgcaacttcggagattgcgcacgccacccctgcggcattcggagcccataacaaatcccgaaagaacatggatgacatcgcaagcagctactttgatgaccgcatcaacggaaaacagaaagtcgatgtgctcctcggaggcggcaagtcaaactttatccgtaaagaccgcaatgtaacaaaggatttcaaaaaagcgggatacagctacgtgacatcaaaacaggaactcaaaaaggatcgtaacaagaagattctcggcctgtttgccgatggcggactcgacaaagcaatcgaccgctcaaacgccgtcccttcattagaagacatgacaacggcggcgatcgacaggctgaacaagaataaaaaagggtttttcttaatggtcgaaggcagccaaattgactgggcgggacatgacaatgatatagtcggcgcaatgagcgaaatgaaggattttgaaaaagcgtataaagcagcgatcgcatttgccaaaaaggacaaacatacgcttgtcgttgccacggctgaccataccaccggcggattgacgatcggcgcgaatgacgataaaaactggcatgttgaaccgattcttgccgccaaaaaaactccggcatttatggctgaccaaatcaaagcgggcaaatccgtatcttccgtgcttgcgcgctatacagacctgaaatggtcaaaagctgaaatcaaacagatcgaaacggccgcaaaacaggatgctgacaagagcatctacaaagcgatcattaagctctttaatgcgaaaaccaacagcggctggacaaccggcgatcatacaggcgaagaagttcccgtttacgcatacggtccgggaagagagtcatttacggggcttttaaacaacacggaccaggccaaaaagatctttcacatcctgaaacacggaaaataaaaaaaggatgcgggggtttccccgcatcctttcttcttttacagatatctccggtgcactcctttgccgtcatacgaaaacatcacttctctgtcttcaagaacagattcgatgtgcacgctcctgccccacagctggtacagatacggcagcactttctccaaatatttcagatcaagctcaattccctcataccaatgtttaatataaagctcattattcttcaggtaatccccgtcattgacggtcagataaggaaatcccccgttgacccgcatgttcacgagctggtcgcgcacggccttccattctttgtcgatcactttatagtccctgccctgcttttggaataaatacaaatcctcacgcatcacgagatctttcgtcaaataattgcggataaatgatatatccgattcaatttccctgacctcaaacattttctcgcgtccggaaccgggctttactcctgtttttttcatttcatctgtcgggttgtcataacgctcttcgatgtcttcaaaaattttcagccctaaataatacgggttgattcccgtttttgacggctgaacgacgcctgcgttcagcttcgcaaattcgatggcttcatctgaagtcaggtcaagctcgcggataatccgctgatgccaataggatgcccagccttcgttcatgattttcgtttccagctgaggccagaaatacagcatttcttctctcatcatggttaaaatgtcacgctgccacggttcaagctcccgcgaatgttcctcgataaacagcagaatatctttttccggccggggcggaaacggttttttcccttttttctttttcacctgcttcggcttatccattccccataaatcatcgtaaggcgatggcgcggtttcttcttcgtcctcctcttcgtcatcgacgctccacagcagcttcggcctgacgagcgacggatcgatatgctcctgaaccgccagaatggcatctaaaaaggactccacctcttttatcccgtgcattctttcataatgcttaatccgctccgccgcagccgccatactctcaaccatgtcccggttcgtattttgaaagcggcagttatgtttgaaaaaatcacaatgggcaagaacatgggctacaattaatttattttggatcagcgaattgctgtccagcaaaaaagcgtagcaagggttggaattaatgacaagttcataaattttgctcaaaccgagatcataatggagtttcatcttgtgaaattgtttgccgaaactccagtggctgaatctcgtcggcatgccgtacgcgccgaatgtataaataatctcagccggacaaatttcatatctcatcgggtagaaatcaaggccgaaacccttcgcaatgtcggttatttcctcaattgcccgctgtaaaccttttgtctcctccgcgttcaaccgaatcccccctacttggacttatttataatgtatgacccctcctctcaaaagatgaaataacagaccggtttccggctgaaaactttcggcacatccgccccgtttgctttatatgtaagtgggtaaaacacacaccataccccaaaaagaaaaggagcgattctacttgaatacagcagacatgcttacgacgtatctcagcaaactcccgaatctgatcatcgcactgctcgtcctgcttatcggctggggcattgccaaaatcattgaaaaagccgtatacaaaggcctgcaaaaaacaaaaatcgacgacaggctgttcgccgaaaaaaagccggcgcgctattcctcagaaaaagtcatcagtaaagtcatttattttatcgcattaatcatcgtttttattctattctttaacattctgcatctgacaaccgtggcttcgccttttgtcagcatgctgtcagcgataacggcggctgtgccgagcattttaaaagccggcctgattctgctgttgggctgggcggccgcttcgcttttcagctatctcgtcaaaaaagcgggcatgaaactcgctgaaaacggccggctcagaaaatggacaatggtgtctgaagaagcggagatgagcagatccgttacggccgcttcacgaatcgttttttacttcgtcttgctcttgttcctgcccggcgtcttggccgctctccagatcagcggagtatcagggccgtttacaaatatgatccaaagcgttttgtcctttataccgaaattattcgccgcggcgctgattgttttaatcggctggcttgttgcccgtctcgtccgtgatatcgtcacaaactttctggcgagtatcggcacggaaaggctcgccgcacgtatggggctttctatttatctgaaggatacaagcctgtcggcaatcatcggaacgattgtctacgtgctgattttcattccggtgatcatttctgcgcttgaccggcttgatgtggcgggtatttctgaaccggcgtcagccatgctgcacacggtcttcacaatgctccctaatatcatcatcggtatcgtgctgatcatcgccggcatctggatcggaaaatgggtcaacagcattgtatccgggctcctgcaccgggccggtttcgactctcttctcggtaaaatgggttttgaacagacgggtaccccgaagctgacgctttctcagacggtcggcatgattgttcagatcatcatcgtcctgctctttacggcagaggcgctgcagcttgttcatctcgaatttctcgtcgttatcgcaaccggtattatcgcttacctgcccaatgttctggccgctgtatttattctcggaatcgggcttttggccggacagctcgtcagcaggctgcttgccggcatgctgagcggaaaggaattcagattcctggcgccgcttgcgaaatataccattatcactctttcaatctttatggcgctggatcagctcggtgtcgccgacacgatcgtaaatgccgcgtttattctgattctgggcggtttcgcgcttgccttcggactttcattcggtcttggcggaaaagaatttgcctcccgttatctcgcaaaattggatcgcaaaattgaaaaacatcaatcggctgacgatcgtaagccgccgatgtcttaacgaaaaaaacgtgtgctcagaaggagcgcacgtttttttttgagttaagggggcaaattccttttttttcattttagattcatatatgatagactgtaacagaagcaaaatctcttttttcgaggtcattctatgaaattaacgaactataccgattattctttacgcgttttgatttttttggcttccagacattccgacgaactttccaacataaaagaaatcgcagatacttattccatctctaaaaaccacctcatgaaagtcatttaccgcctcggccagctcgggtatgtcgaaacgatccggggccggggaggcggaatccgtttaggaatgacaccggaagacataaacattggagaagtcgttcgaaatacagaagacgactttaacatcgtagaatgctttgactccaaaaaaaatctctgtatcatatctcccgcctgcaacttaaagaaccttctgaatgaagccctgcaagcttacctggccgttttagacaaatatacgttaagggatctggtcaaaaacaaagaggagattatgagactgctcagaagctgaaggaatgcccgcattccttctttttttatgccggcataagaaaaaaggactatttctattaatatgataaacgattgcagacaagtgccgatataaagattatcattactgatatcctcaccttgcgtatgcaacgaatggggatagtaaaatcatcgcaggaaaagggagattcattatgaaaaaaaaggtagcggtcggtttgactgcatctgcgatcgtcgggtctgcgttagctgtaacaccggcagaagcacaaacgattaaggttaaaagcggagattcattatggaagcttgcccaaaactacaatacaagcgtggatgccattacatcagcgaatcatctaaaatccaccgttatttctatcgggcagacgctcaacattcctaacggcaaatcagattccggcagcaaaaagccatcttcaaagaacagcggcacgactaaaagcgtttatacagtgaaaagcggagactcgctgtggctgatcgcatctgattttgaaatgtccgtacaggaactgaaaaaattgaacggtctgacaagcgacttaatccgcgccggacagaagctgcaagtgacggggaaagtttcctcaagcaccgatcagaaaaaaaccgctcctggcagcagctcaaacaacagcaaaaagcagtcatcatcttccgggacgtataaagtcaaactcggcgattcactatggaagatcgcaaacagcgtcaatatgaccattgcggaactcaaagtattaaacaacttaaaaacggatacgatctacgtaaaccaagtcctgaaaacaaaaggaacgtcttcttcgggaaacacgccgtcaaaggacaattcaaaccaaaataaaaaccagacgcaaacgtcctcctatacagtaaaaagcggagactcactctggaaaatcgcaaacgcatacaatatgacggttcagcaaatcagaagcatcaacaaactgacgtcagacatgctgcgggtcggacaagtgcttaagctgaccaaaacgtcatcttccggctcttcgacttcaccgtcaactccgaaccagtccggaaatacagggaaaaccactacatataccgtgaaaagcggggattctttatgggtgattgcccaaaagttcaatgtgaccgcccagcagatccgcgagaaaaacaatctgaaaacagatgttcttcaaatcggacaaaagctgacgattaccgggcagcagacaaacacaacaccgaatcagtccggcaacacaggcggcacaggttcaacaagcgcgaagattaatgtaatgatcgatgccgcaaaagctcagctgggcgtaccgtatgtatggggcgggacgacgccgagaggctttgactgcagcggtttcatttattacgttctcaataaggtcacttctgtatccagactttcagccgcaggctactggaatacgatgacatcagtcagccagccggcggtcggtgactttgtctttttctcaacttataaagccggaccttcccacgtcggtatttatctcgggaacggccagtttattaatgccaacgattcgggtgtcgttatttccagcatgaacaattcctattggaaacagcgttacctcggcgcaaaacgtttcttctgatatctgacaagctgtacggcctcaattaggctgtgcagctttttttacagtctgaaaatattaatgctgatcacatgttttgtcacgggatggaaatacacttcagcacgggatgaaaacgtttcttttgttgtttgcaccgttacgcgaaacacatctttcgtctgttcccggttcacttttgtacggcccatgtacgaataatcggtaagctcggcccccttgtattcacgttcaagctggttccatgcgagctgctcccatttttcaactgatggatcaaggtgttctgtatgccctttttcagcgatcgaggcaatgagaatgccgcaaaacaagagggcaagcgcaaatggaagggatttcatctttatgttctcctgagtcgttttttgtcaatcttagcgtgtccaaagaagagacggatatgcggttttattttatgtctccctcatattgctatgccgctgtgataaggacaccaacttttcccccgttgcatcggtcttcgacggcataaactaacggagaacttctcattgaaaggagaagcgttagatggatcatgccgattatgacaaagccttgtattacacacaccggtctcaatgggacaatttgttaatattgatggttcgtacaaaagatgatttattatcaaagcgtattgagcactttctgcacgcgtatcatttcgaatatgatcatgcggtgcttgaaaaagagctgtattcccttctcgggtatattgatcatgcgacagagctcgcttatgaagatcaattagccatgctgacataaaacaatcccggcgtcagacgccgggatttcttatgtttgtgaacatattcagctcttcgatcatctctttcaggctgaccgccatatcctcagatacggtccggcgctccatgtcaatgtgaatcgggtctaagaccagctgtttcgggatgacatttgcataaacgccccgcatgaccgtccgcatattcgccagcgcgttcatgcctccttttcctccgcccgccgcggcaatgattgccaccggtttgtatgcccagtgatcgctgcttaaaaaatcgatggcgttttttaaagcgccgctcatgccgctgtgatactcgggagataataagacgacggccgccgactttttcacctgccgccttaactcttgcactgaaggcagctcgttctgttcttcttcaccgttataaagcggcagatcactttcgctcaaatcaatataatcggtatgaaaccgatctctgatataagaagcggcaattctagtccgcccgttttttctcggtgttccgctgatcactaatatgctcatgattttaccgcctttccaaaaacattatattttaccgcatacaatgccgcctgcgtccgatcggaaagattcagctttgacagcaggttggacacgtgggtcttcactgttttttctgaaataaacagtgccgccgcaatttccttattgcttttccctttggctatttcttgaagaacatctttttcacgaggggtcaggtgatcatatttttccttatcctgatcatcctgaaccatatgggtcagcacgtgaggcacaatatccgccgacagccggtaacgtccggaatatacttcccggagcgtttttactaaatcatcgggctgagcgtctttcagctgatacgcttttgcgccggctttaagggcgggaatgacatgctcctgatcagaatagctcgtcaaaacgacgatactgatgtccgggaatcgttccgccgcaatttttgccgcttctatgccgtccatatcaggcattgataaatccatcagaatgatgtccggctccgtcttttcagcttgctgaagcgcttcagcaccggtggacgcctcaccgacaacttcaatgtcttcctgagtggcgaagaaatagcgcagtcctttgcggacaacgtgatgatcatcagcaatcacaattttcatcaatcagacctcctgtcccgaaacggaagccgaacggagacaatcgttccggcgccaagctcggattgcagtgtaaagcggccgccgattgcttcagcccgcgctttcatgccggccacgccgagcgatgggagcacagcatgcgcatcagcgctgaagcccgctccacggtcgctaatatgaagctcagcgcaatccggctttttaacggcggaaatgataacccggtccgttcccgcatgctttttacagttattcaaggcttcctgggcgatccgccaaagcgcgtgttcctgttcatctgtaagctccagctcatcctccatttcacaaacggcttccaggccgataagagcggcatagcttttgatcgacgcatacagccctttcgtcaaacttttcggcttcagctgccaaataagcgctctcatttctgttagcgcatcctgcgacagctcttgaataaacgtaatcatctgccggagccgatcatcatctgtaaagctctttgcggcttttgccgttaagctgacagaaaacagcatttgattgacggaatcatgcagctcttgcgcaagtctgcttcgttccatcaacagggcgttctgctgctcaaattcggccaatttcatccgctgaatcgccgttccgatttgaaatgcaaccgcttcaagaagatgcagttcttcttcgttgaaaaatgtcttttcgcttgcggcgacgtttaataaaccgaacttccggccgccgtcctcaagcggtacggtcgcatggtgggtaatgccctctgtatcgcggcagttcgtcgtctgttccgcgaattcaatccgtttacaattcattatgtttacggcctttgtcaatccgccattgctgaatttggtcagacaatagcattccccgctgcacatgagtgcattttcccgctgaccgagagccggcggtaaataagcggatgcggcgagcgtataagatccgtccggctcaatcagaaaaatccaccctgtctgcagcccggtcaggctgagcagttcgcgaagcactttatcaagcgcttcctttaaatcgtggctttggtttaaggtttccgcaatcgcttttaacgtttttaacgtttctaccgtcgttgtcgttttcgtcaatttccctcactccggccaatcagaattatccatattatatcaattcttttctgtatattcctttgttttcagcatgaatttccctcatactttcggatgaggcgtataaaaaaaccgccggatgtcgcttccggcggtttgttgtttatttcgttttttccactatgccatctaccgttttcatgacggcttcagataatgcggcaagacgctgttcgctgtcttgtaaagaagttcccttcacggcgaaataaaacttcactttcggctccgttcccgatggacgaaggcagaaccaagagccgtcttcaaggaaatatttcaggacatttgacttcggcagatcaatatcttcttcatgatgatcggcaaatacagtccgttttcccgttgaatagtcttcagcctgcgtgatttgttttccggccatctgcttcggcggatcgtttcggaaggaagtcaggatagcggaaatctgctctgctccctgttttccttttaacgtcaatgacttcaagccttcacggtaataaccgtattctttaaaaatggacagcagcgcgtcataaagcgacatgccctgctttttataaaaggcgcatacctcgacggctaacagcgcagcctgtatcgcgtctttgtcacgcgcgaaatcgccgattaagtagccgtagctttcttcatacccgaactggaacgtgtattggcctgatttttcatattctttgattttttcaccgataaatttgaagcctgtcaacgtgtcaaccgtatctaatccgaacgatgaagcgacggcgcggcccaattcgctcgtgacaatcgttttcatgacgacaccgttttcaggaagggcgccctgttttttcttctcggaaagcaggtaatgcaataaaagcgcgcctgtctggtttcccgtcagcactgtgtacttgccttcgctgttttttacggcaatgccgagacggtcggcatccgggtccgtagcgacgagaatatcagcgttttgttcttctccgagtttaatggcatattcgaatgccgcgtgctcttccggattcggcgatttgacggttgaaaaatccgggtccggcagctcttgctcctttacgacggtgacgtttttgtaaccgagtgcttcaagaccgcggcgcaccggtttatttgccgtgccgtgcagcggagtgaacacgacgctgacatccacttcagccgaaagctcgggatgtacggagatggaagtcagttcttcagtatacggtttatcaatttcttcaccgattattttaatcaaacctttttctttcagcgactgttcatcttcaacttgaatcgttaattcattttctatggcattcacttccgcaatgacgatgtccgcttctttcggcggcagctgtgcgccgtcatcgccatacactttatatccgttatattcaggcgggttatggctggccgtcacgacgataccggcataagcgttcagctttctcaccgcaaaagacagctcaggcgtcgggcggagctcatcaaatacgtatgtttgaatgccttgggaagcaagggtttttgcagcttccatcgcaaactcaggagatttatgacgggagtcgtatgcgatcgcaacccctctttttttcgcgtcttccccctgtttcgcgatatacgccgcaagtccggcggatgctttgcggaccgtgtaaatattcatcctgttcgtacccggcccgatttctcctctcatgcctcctgttccgaactcaagatttttgtagaaaaaatcttccagcagctgctcgtttccttctgcgtccgccaataattttttcaattctgaatctaattgttcggtctgattccagcgttcgtaactcttactccaactcatgttcgtcctcctataatttcagcttatgaccatattttaatatgaagcggctgcccgtgtcacttgataacttaaccaaatgctttatgtaaaaagataaaagaagggctcatgccttttcggcacagccctccggttattattgttcgagcggaacaaccgcgtcgtgcagcagcgtatttaaccactcagtgtgtttttctttcgtttcgtcattccattggaatcggtcgctcatgtaatcaatcacggccgttttatacgtttgcacccatttgatgtcgaagaacagtcttcccgttctgcggacgaagaaatcggcaggtgtcgcagccatttcttcttcgatgctgtaagccgcttcagccaaaatgtgaactggaatctggcgtttttccgcttcgtctttcagaccctcaatccggctgaatacattttcaacgttagagccgtatctgatggctaactgcttagcggtttcctgtgataaaccgattttcaagccgtcttttgtctttgcttccacaaatgactcgaagtttttagagccgccgacatgtccgccggaaatcggcatcgtcttcgtcttgcagccgccgaagtcctggccgccctcttctttcaagcggtcgcggacaagatcgacaatgtgctcagccattttacggtagcccgtcagttttcctccggcgatcgtaatcaggcctgattgagatgtccagatttcatctttacgggagatctcagacgggtctttcccttcttcgtgaataagcggtctgaggccggcccagcttgattcaatatcgtccgccgtaatgttcagttccgggaacatataattgatggagctgacgacataatcgcgatcctgcaccgtcatgcgcgggtgctcaagtttttgtttgtaaaccgtatcggtcgtacccacgtatgtttttccttcacgcggaatggcgaacaccatccggccgtccggcgtatcaaagtacaccgcctgtttaagcgggaatacggattggtcgaatacgagatggaccccttttgtgtgctgaagatgttttccgcttttgctgtggtctttttctctcagctcgtcgacccacggacctgtcgcattgacgatttttttggcgtaaactttgtattccttgcctgacagcagatcttcaattaaaacaccgacaacttttcctttttcataaagcagttctttcactttagaatagttgacaggctccgcaccgaatttaacggcttctttcatgacttcaatcgtcagtctcgcatcgtccgtccggtactctacataatagcctccgccttttaagccgtcttttttgacgagcggctctttttgcagcgtttctttagcagacagcatgcttctgcgctctgatttttttactcccgctaaatagtcatacacacgcaggccgatggaagtagaaaatgaaccgaacgtgccgcctttatgaaacggcagcagcatccattccggcgtcgtgacgtgcgggccgttttcgtacacgatggcacgttccttaccgacttctgcaaccattttgacttcaaattgcttcagataacgcaaaccgccgtggacaagctttgtggatctgcttgatgtgccggccgcgaaatcctgcatttcgctcaaagcgactttcattccccttgaagcagcgtcaagcgccgtaccggcacccgtaatacctccccctataataaacagatcgtatgtttttttagtcatgtcttccagcatatgatcccgttccaaacttgaaaattggtgattcatcattacgtttcctccttgttgtcacggtatagaaaaagagaccacaacagccaaagcgcagttatcactttggtgctgtggtctctcctcatctcaggaccgttcctattaacttgttttcagtataccacatttttatcttatttaaaagccatagctgcatttactgcttttttccatccgccgtacaattcatcgcgtttttcatcttccatttccggtttgaattgcttatcaaggttccattgatcagcgatttcagtgctgtccttccagtagccgacagcgattccggccaaatacgcggcaccgagcgccgtcgtttcattaatttccggacgttcgaccggcacatcaagcaagtcgctttggaactgcatgaggaagttattttttaccgctccgccgtctacacgcaatgtttttaaagagatgcctgaatcagcctccatggcatcaagcacatctttcgcctgataagcgagagattcaagcgtagcccggataaaatgctccttcgtcgttccgcgtgtcaggccgaaaactgagccgcgcacgtcactgtcccagtacggtgtgcctaatccgacgaaagcgggcacgacataaacaccgtcagcggaatccacacgctctgcgtatgtctcgctttcttttgaatcttggaacatccgcatgccgtctctcagccattggatagcagaacctgcgacaaagatgcttccttccagtgcatactcgacttttccgtctaatccccaggcgattgtcgtcagaaggccgtgatcagaagtgatggctttttctccggtattcatcagcataaagcagcctgtgccgtatgtgtttttccccatgccttcttcaaagcacgcctgaccgaacagcgcagactgctggtctccggccgctcccgcaatcggaatgtttttaccgaagaaatgataatcaaccgttttcgcgtacacatgagaagacggtttcacttccggcagcattgatttcggcacgcctaaaatatcaagcagctcgtcatcccattttaattcatgtatattaaacatcagcgttcttgaagcgttggaataatccgttacgtgcgccgcccctccggacattttccagatgagccatgaatcaatcgttccgaacagaagatttccgttttccgctttttcccgtgcgccttctacattgtcaagaatccatttgactttcgttcctgagaaataagggtcgatcaaaagtcccgttttttctctgaatgtatcattatatcctttttcacgaagctcttcgcaaatgccggatgtttgtctcgattgccatacaatcgcattgtataccggctttccggtatctttatcccatacgaccgtcgtttccctttggttcgtgatgccgatgccggcaatttgatcagcgctgattccggactcggagatcacagtcgcgataacggcgagcaccgatccccaaatttcgttcgcattgtgctccacccagcccggctgagggaaatgctgtgtgaattccttttgagcggaatgcacgatttttccttctttattaaaaagaatcgctcttgaacttgttgtgccttggtcaattgataaaatataggtctccatgatgccgctctcctttttaaatatattcagaatttgataatgttttctgtgattgagatttcttggtataaatatagagtatgaaaagcactacaaccattataacgcttacaaaccaaaagctaggtgtcacatttcctttaaacgcggcattgtaaaatacgccgccgaacgcaccgcccatgatcggaccgattacgggaatccaggcatatttccaatttgacggcccttttttcggaatcggcagaaaggcgtgagcgattctcggccccaaatcccgcgcagggttgatcgcatatccggtcgtccctccaagagaaatcccgatggcaacgatgaggaatccgacaatcagcgggttcagcccttttgtaaattcattcgctccgattgccaaaatgccgagcacaagcacaaacgtaccaatgacttcacttatcatattcccaaatgtatgaggaatactcgggccggtcgagaaaacgcccagtttagcggccggatcatccgtcgccttccaatgcggcagataatgaaggtacacaacaaccgcaccgatcattgctccgatcatctgtcccgcaatataaacaggtacctctttccaaggaaagctgccttcaagcgcaaggcctatcgttaaagccggattcaagtgggcgccgctgatgctgccgacggcatatgccgccatggctactcccaatccccagccgaatacaataacaatccatccggattggtatgaaagcgatttctttaaattgactcccgcacaaacgccgccgccgaaaataacaagcagcattgtaccgattacttctccccaaaatgctgtcatcatcattcctcctaaatgacataatagcaggtttgacagagttatagagaataaaaaacccacaacaaaccgctttacgctttattgcttccgtaaagagctgttgtgggtctccgggtctccatcacatagtattaacctaggtctattgtaacaatgggtgtaagcggtgtcaatctttttttgtcatagaatgttcatatttagcccatagttcggtgtctgaagtcgtcacggccgtggctcctgcctgcaaggcgttttcaacgtcctgctccgtgcggatgaagccgccggcaaaaatcggaatccccgtcatttctttaatttctctgattaaagtcggaacgatgcccgggagaacctcgataaagtcaggcttatgcttcccgacgaattccatgcttttctccatggcgctcgtatctaagagaaacagacgctggatcgcgtatattttcttttgtttcgctttgacgatgactgatgatctcgtcgaaatgatgcccgcgggccggatatcctggcaaatgaactccgcaccgtattcatcatgcttaatgccgtggattaaatcgacgtgaaccatcagaagttttccgtgttttttcgcttcattcacgacaccttttaattgaccgaggtggatatctaaaatgacgccgtataagaacggactttctaaaaatgcatcgaattgcttcatgttccggattgccggtagaatctgctggttgtgaaaactcatgttttactcctttacattaaaaatcaatgctcagcacactttccttgacggtcgaaatgatgaaagagagctcctcgtccgacaggcaaaaaggcggagacagctgaatgacattattatatcccgctacagtatcgccatttttcccgacaagcaggcctttttctctgcacgcggtgatgacgtgctgcacaagggcggcatcagcgggttccttcgtgattttgtccttgacgagctcaatgccggcaagaaggcccttgccccgtacatctccgaccgccggatgttctctgagcggctcaagctcacggagcagcctttctccaagctcccgggagcgggcgatcagattttcgtcctccatcaattgcaggtttttcaaggccagggcgcaggctgccggattgcctccgaatgtattcacgtgccggaagcggccgtacggctcaccgcccgaatacgcctcaaaaatctcccgttttactgccgttgccgacagcggcagataagcgctcgtaatgccttttgccattgtgacgatgtccggtgaaacgccgtaatgctgaaatccgaacggctctcccgtgcggccgaaaccgcaaataacttcatcactgatcagaagcgcgccgtggcggcggcaaatgtcctctacctttgccatatacccgtccgggggcatcaatatccctccgcctgtaataatcggttccataataacgccggcaatcgtttcgcttaattcccacgtcatgatccggtcgatgtcatgcgcgctttccaatgtgacggcatcgccgggattccgataaagatcaggcggcgccgcgtgcaaaaaaccttgtgagagcggctcatatttatactttctctgcgcctggccggtagcggcgagcgcccccatcgtattgccgtgatagcctctgtaccgggagatgaatttgaagcggctgtgatcgccgttttcaatgtggtattggcgggcaattttgaacgcggtttcatttgcttccgatccgctgttggaaaagaagattacataatcgccgcctagccattcattcagtttttccgcaagctcaatcgcgggttgatggctttgggtcagcggataataaggaagctccttcaattgactgtaagccgcatcggcaagttcctttctcccatatccgatattgacgcaccacaggcctgacatgccgtccaaataccgtctgccgtcaatgtccgtaacccaggcgccttcccctttttggacgattatgctgtcatccggctccgcccctttcatcgcgtgccaaatcagctctttatccttttgtttgagtgactgatttttttgtacatgttccacaccgctcatctccctttcaatatcattgcactgtatcgaaagctgcccggcttctgacgccgattctcttggtgaagttttcctcttaataagaatataaaggcgcggcatgggcgagtcaataaagcggcggcaattaaaaaaacgctttctcccagaaagcgaaagggctacaagagcatatcccgaaaccggggccggtgcaagtgtttttataaaaaaacccgccccttaagcggagcgggcgttttttttatttcagatgcgtaatccggtaaatatctttgcgccggtctttcagctggcgcacggttccgttttcacgctgccttcttaagatttcaaggtccacgtccccgatcacgaccatttcgatattcggattcgtttcaccgacgattccgtctctggcaaattcaaaatcagacggagcaaaaatggctgactgcgcgtattgaatatccatattttctgtttgcggcaggtttccgaccgtacccgagatgacggtgtaaatttggttttcaaccgctcgcgcctgagagcagtaccttacgcgcaagtagccttggcggtcttcagtgcagaacggcgtaaagataattttcgccccttgatccgcggcaattctcgcaagctccggaaattcaatatcgtaacagatctgaatggcgatctttccgcagtccgtatcaaatacgcgcaccctgtctccggcgctgatgccccaccatttccgctcattcggcgtaatgtgaagcttatattgtttttcaatcgtgccgtcacgtctgaataagtaggcgatgttataaattttcccctcttcttcaacgaagtgggagccgccgatgatgttgacattatatttcaccgcgagatctgtaaagaggctgatatagtcctcggtatattcggtaatcctctgaatggccagactcggagaacgctcctcgaggaaagacatgagctgcgtcgtgaaaatttccgggaacaccgcgaaatcagatctcgcatcggaagccacatcgacataatattcaacctgattggcaaattcctcgaaggagtaaatctttttcatttcatattgaatgacgcagatgcgcaccggaaatgccgatttgtaatagcgcttcgattgcggcaggtaatcgacattgttccattccattaatgtcgcatattttatggacgcggtgtcatccgggagataattcggattgatccgcatgagcgtaaatccgttcatcagctggaaagaaagcaccggatcataaatctgatggcgcgtcacctgttcgacataagctctcgccgtcatttcttccgcatacttatgataattcggaatccgcccgccgataataatgcttttcagattcaatcgtctcgccaagtcttttctcgcctcatacagccggtgtccgatcttcatccgtctgtattccgggtgaaccattacctcaatcccgtacagattcaatccgtccgggttgtggttcgtgatataaccgtcgtctgtaatgtcctgccacgtgtggcggtcatcatattcatcgaaattgatgatcaggcttgagcatgaaccgataatttccccttcatactcggcgcaaaactgaccttcgggaaagtgcgcgagatggctgattaaatgctcaggctcccacggctccatccccggaaaacaatccttttgcagctcaataattttgttgatatctttctcttccatattccggatgaccattttcttttcaaaacgggtcagatcaagtttctcagacaatgctgcttccccctgccggttcgttttgatcgttcaatcgctgtaagagtaattcaagttccatttccgccatcgattccagtctgtgatcgtactcttcaaataacagggcgcttgttaccttattcggcacgatgacacatttcatgccggcccgtttggctgcaattgagccgttaaccgaatcctcaaaggccagacattcagatggttcaacgcctaaatgttccgcagctttcagatagagttccggattcggcttcacttcttctacgtcgtcagccgtctgaatcacttcaaattcatcaaacaggcctaattccttcagatggcccgatacccatttgaaatctgagctggacgcgagccccaccttcaatcctaattcttttgccgcggctaaataagcttccaccccggggcgagccgtttccgtcttcatccgctgttcgaagcgcccgcgcctgatcgccgtcagttcatcatgatcgagctttcttcccagctgctcctctaaatatgcgaacggcttaaaccccgcggccgttccgatcacctttccccagacggataaaggcaatgttgaaccgtgttcctcaaacatttcctgcagcacttcatattcatgggtttctgtatctaaaattaacccgtcaaaatcaaagattaatgcttttatcaatggttacagctcctttagttaaacgtactgacctatgtatacactataccgtgaatttctttcgcgttcaaaatgtaacattctgacggaaagaagagcctgcataagtgcaagctctcttcatccgttactgtgtgttttgactggaaatattggaaagagccgctcccgcagactcatttgaacgctgatcaaccgctaagtctccaagcgcaacgatcccgaccagatgattttgatcgacaatgggaaggcggcggatttggtgttgggccatcagatgtgacgcctcttcaagactcatttccgggtttccggatacaactgcagaagacatcacgtgtgaaacaggtgtttggccgtcgcggccttgagccgttgttctcaatgcgatatcacggtctgtcagcattccttttaattcccctccgtcaacgacgggaattgctccgacattatgctggtgcatcagcgcagccgcttcctgaatcgtttgattgggagaaacggtagccacgtgggtagtcattgattgtttgattgaactcattgtaaagcacccctttcgatatttattatgctcggggatttgtctcattataaagggagttagaggaaagaaattgtggtatcatgtcaaggaagcaaaaaagagcctgtcaaaaggctctttatacccgtcagatcagccttctgtgaccgcaggcttctgatccggcccctgtctcgaaagcatcataggtaaagggaaaattcattccgcattcattcagcaaagcgcaatttttatcaaacagcgcccgctttttgacgtcatataccgggtgcggctttgacagcatgatatgtaccgtttgcagacaagccataatttgaaacgcttcttttaaagttccttggtaacgttggttttgtaatgataatacgcccctttttttaaagcgctgaatttccagttcggagaaataaagaggaaagacattttgaaacaattcagaggaaagctcttgtatcgcgctttcttgtccgtcagtcgctgcgttcacaattctcacatcaatcacctttcttgccatgtgaatatccttaatctttatcaagaatagcacagaaaaaaacgcgaaagctaaggtaagtgtttcctattgaaacagccgctttccgcttgaaaaggagctttatgatatgaaacaaaatgaccgcggtctggaactcctgattacggaaaagcacgccggacaatggctgttttcagtcctgaaatctgaattccaggcgtcaaaacccgtaattacggaatggatgaaccaagaaagcattcaggtgaatcgaacatccccgaaaaacaacatcatactgaaaaccggagatcgcttattcattgatcttcaggaaaaaacgggttcttcggtgactccggaatacggagagccggacattttatttgaggacaatcatatgctgattgcaaataagccggcgggaatgccgactcatccaaatgaagagggtcagaccggcaccctcagcaacctgatcgcttaccattttcaaatcaacggcgagcaggcgaaagtgcgccacgttcaccgtcttgaccgtgacacgtcaggcgcggtcgttttcgcgaaacaccgcctggcccatgcaatccttgaccgtcagctcgaaaccaaaacattaaaacgcacctatatcgccgcggcggaaggaaaagtcgcgcctaaaaaaggcacggttgactcgccgatcggccgcgacaggtcacattcggtcagacggcgtgtctcacccggcggacaagctgccgtcacccattacaaagtgaaaggctatcatcccggtgcgcagcttacattggcagagcttgaactggaaaccgggagaacacatcaaatcagggtgcatatggcaagcatcggccatccgttggcgggcgatgacctgtacggcggaagcaggacgctgtttcacaggcacgcgcttcacgcaaaaaaagtcagtgtcgtccatccgatctcaggagaagaaatcgttgccgaggcgccgatgccggctgatctggctcattttaccgaaacgtattttttttaaaccgggtcggcatatataatatatcgtttcggcgcatttccaatgtaagaaaacgggtagcaagtggtcaggatcagttcctcccgcttgtgctgaagggtgatgacagatgtatcatcccggctgacgatttttgtacggctgattttataagaaaacgtgccgtaagacaaaatcacgttcagtctgtctccttttttcaattcgccggtccggcggaacaccgtgtccctgtggccggataacacaatttggccgtgatcgcccggataatagctgtccttataatgtccgacgccttttgctaaatcatctgcgtcagtcccttcgacgatcgggagctcagcgtcgatttcagggatttctaaaatgccgcttgcctcacccgtttcggggtgaaattcttttttgcgctgtgtcagcacagcgctttttgtttcgttcttttccaagacaggttctgttgctttttttgcttcttcaagcgattggttcgttttcatatgtgaatcaatgatcttccagcttccgtaacatgtgatgatgataccggcgatgatgacgagaagcggaatatgtttcagtttgttcatcgtgtgcgggttccccttttctttctgaaaagccaatatacgccggcacccgtgatcactaggccggccaatgccgtctgatggctgcccgctgaagtatcaggcaatgggcggcctttttgtgtgccgctttcagtctgttttgtgctttgttccgaatttgcggcagacgccggacgggattcgggaattgactgcactgtatcagatgctgtttcttctacgacaggacgtttagtttttttggtttgatcaggctgttctgccgcatccggttttttagcgggtttttccgcttgaggtttttctcctttatcaggcctggtgccgcccggtgtttccccgcttcccggctgattgccggtgtcatcaggtgtttcggcggctgataccgtgcggatgcggccgtcggtttgataagaaatcggcgcggaaaagcttttgacatagtctactgtcgcttccaaatcctcaggccccgtcaccggattcttgccgagtttcccgatcggaccgtattttgcccccgctgccgtcgccataaattgattgactgttactgtatatcctttttcgggctgtatgtctgtcccgtccgccattttcatttcaaccgcttgtccggtttccgggttccatgtataggaaaatccgctgatgctgtaatccggaccgtacaccggagaaatttgcgcgttaatgatctcccgcaaatcttttcctttgatttcaagcttcgtcagcacattgccgaacggctgtacattataaaggtctccccatgtgatcgcccctttttttatgccgtcccggatgcctcccccattcataagcgcaaaatcggatttcatcttcgctttcataccgtcggcaatcagatttccgagcgccgtgtcgccgtcatttgaatacccgcccgttatatcatgggccgcttccccgaccgcttcgctgataatcggtttcactttctcttcatatttgcttaatatgcctgccgcagccgggtcaggcttgattttactttgatcgatatattggatttccgctgattttttcacgatatccttcgactctttatcaagttcaagatcggcgattccgattgcttttccgtattcaaatgcctgcacgatcagcttgccgtcgatttctccgtttacgactttatgattgtgcgcggcgaaaatcacatcaatctctgagtctgttccgcttgcaagctttgcggattctcccgtgattgctgagccattttgttcagcagacatatgggcgagcacggcgattgctttaattccttttttcttcaggtcagcggcggcgtcattgacggcctttacctcatccgtaaacgtaatatctttaattccgtccgggatgaccatgcctgccgccgatctggttacaaccccgataaatgcgaccggaattccggaaacgtatttaatttcatacggcggcagaaaggactcccctgacttcagtttacagttggcgcagacgagcgggaaattttggccgtcataacagcttgtccccttaccgtccggatgatctcctccattgatgatccgtttaagctcattcgttccttcatcgaattcgtgattgccgacagttccgacatcaaaaccgatgtcttccatcaattctactgtcggttcatcctgaaaaagggctgacacgggagagctgcccccgatcatatcgcccgcatgcacgacaaaggcgtgttctttctcggctttcgcctttttaatgtacgctgcggcgtagtccatccgcccgaacgtgccatccggtttaccgtctccgttaaggtcaagctcatattgctgatcaatttttccgtgcagatcattcatgctgatgattctgagcgggacacggccggagtcttcagtctgccgttctttatacgctttatccattccagcttcattcagtgatcctgcttgtccgattgcttctgcatctttcacgctgaacatcataaaacaaaccgtcagcaaacagcacgtaagacgcatacccctttttttcttcatttatttcccccctgtcttctaagaaatacgttagcttattttcttagaaatcacatcacttttttgtaaagattgtcttcactggcgcaaaatagtaaataatccccacgtaacgaaacaggtcttgatgtataacggatcggcttttttcacatcttaatgatgatttgacatgaaggaggaaaacaaccagtggaacagcagcagaatcagcagccgccagtaaatcaagggatcccgggttcaccgcaagtgaatcacggaggacatgagcttttcgatatgcatgaagtgctggccggaacagtcggcgttttggatcaatttatgatgctcagacagtttatacaggatcagcagctggccgacatccttgaccgccagtatcaattcattctcggactctataatctgacggcagaatgctttaagaccggccaaaagccttctcaggaaacgtcgacatatatgatgaaggaacagaaccaggccgtctacggtataaaaccgactcagccgaaaaaaccgaatcaatcattaaatgatgtcaaagatctcgggatcagcggccatatgctcggcctgattaaagctcaagcttctctcttgacgatgagctcgcttgaaatgaccaatcccgtcactagaagagtgctctccgcccaaattcagcaatatgtcgaaatggcgtatgaaatcttcttataccaaaacaaacacggttattatcaggttcctcagctcaatgcacaagatatgcagaccatgctgaattcatttacgccggcccagggacagccgcaaatgcctccgattaaaggacaaatgggacagcagcagcaaaacctccattgattaaaaaacggcgttggaaacctgactctccaatgccgttttctttttttcatatgcttttatgaaatcatgttcaaattgtttcaggctttctttcgtagccgcttcaaagcctttttcaaaatcctgtgtttcggcggttttgttgataatggttaagataatgccttctccgaatgtttcggttaagtcctttatcatatagaagctttgcaaatagacatccgtttcatattccatacgcgatttctgccattttcggtcggtcgttaattgatcaaacggcacgacggaaaatgcaatcggatcaatgactacatcataatgcgcgacccactcgctcagcccctcatgaaaccaaagcggaaatacagacgtatccgtccccaattgccgcgttttttgatgaaacgcgtaatgtgtatattcatgtataatcaattgcttatacatgaaaacggccagctcatcttttttcaaaagctgttttttctcttcaggcaaaagccccatcatctgctcctgttctgaataaaaaccgactacatttttcaatcctgaatattgctccatttcagcttcatccgaaaagaaaatgagttcaagcggcgctgcacctttatagccgacaatgatttgattgatacgctttgcgtggtccagcgtaagcttggtcagatccaagagcggcttttcatccgccgtatagtaaatcgctgtatgtttgtaaatttctttattcatgtgttcagtcacttgttccttcgtcggaacagagcggctgttttggcctgacaggacgtacatcatacttactgaaacggctgaactgacagccaatatgacaaggactccgcacaggatcagagtgaatgccgcccgtttccccatgccgtcacgcaaacaagctcccctccccgatcctttcattttcatctcattctttactttatgctcaggagcgctgggtcgtgacggcagataaaataaaaaagccgcagcaaatgcggcttttccattcatttatttattggggtttgggaatacacgctgaaccatttggccgaactcatcaaacagaccggatacaggatgtccgttttggattcgttttccgtagccttgcatacgttcaacgaagtccgggttcgctgatacatatacagtccggacatgtttatcggctgatttcaccttatcggtaatcttattttttaaatggttggcgatggcgcctttttgcccgtttgtcaaaacaacagcaacatatgcgctgtttccggcaacgatcacagtcgcatttttaacctcttttaaatcagtcaccttgtcggcggctttatcagccactctcaggttacgattgtcattgtgatcggtgttttggttatgacggttcactgtattcatatttgtcgcaccgtcgttaggcgtgttgcggtaatttacattctgggtgcggttgtcatttcgttttccttctccctggttccccatactgcaccctgcggtaatcagcatcggcagaagaagggcagagataactgcttgcttttttatcatgtgaattcctcctttctcactttacgtataggtttttctattcggcgggatttatacacgccgtttgcattctgagcggtttggataaatatcagaaggaaagggaaaggtaagcgtaatcaattgaatgaggagggatttaacttgttcagaaaaaaaagcggcatcggcccgacagcgctgctgatcggatcatcgattctgattgcagctttatcacccgaaatccgccggaaaatctccggaatggtttcaggcagaatgcagcataaagatggcacacactccatgcagcctgctgacctgattcaacaggcgttcggcggggaatccggcggacagcagcacgcagacaaagcccggcattcacaaaccggctcattacagcctgccgagctgatcaaacaggcgttcggcggggaatccggcggacagcagcacacggacaaagcccggcattcacaaaccggctcattgcagcctgccgagctgatcaaacaggcgttcggcggggaatccggcggacagcagcatgagcagacttcccgcaatcactccggctcatcccatacggacagacaggcagaccgcagccgcagtaaagaaacttcgccgaagcctcactataccgagccgattcacttcgaagaaagcgcggtaaatgttttaaatgacagcaccgtgatgaatatgctggaagaaattgaacccggaaatcattagaaacgaaaaaatccttcattcgttcaacgatgaaggattttttcgttttagcgctctatctcatatttttctataagaaaatgaaccatcgatctgcttttgttaagcttcttcagcttcaatgacgattgaggaatcattgtacaccgcggtatcggtttccttcgtcattttacttgttaacagccctgcggtcatactgccgctgacatttaaggcggtgcgccccatgtcaattaacggctcaattgaaatgagcagcccggcaagcgcgacaggcatgttcaaagaggataggacgagcagagccgcaaatgtcgcgccgcctcccacgcctgctacaccgaatgaactgattgccacgatggcgatgacggagatgataaatcccggttcaaacgggttttgccctactgtcggcgcaatcatcatcgcgagcatcgccgggtaaatgccggcacagccgttttgaccgattgataagccgaatgaaccggcgaagttcgcaatgccttccggtacgcccatgcttttttgtgttttaatattgagcggcaaagcccctgcgcttgaacgggacgtaaacgcaaacaccataaccggaaatgcttttttcacgtatgtgatcggatttaaaccgctgaacgtgatcagcagcaagtgaatgataaacatggcgataagcgcggcgtatgaagcgatcacaaacatccccagtttcgcaatgctgtcgatgtcgcttgtcgcgatcgttttggtcataatcgccaataccccgtaaggcgtcagtcttaaaattaatgtcacgacgcgcataataatcgcgtaaaccgcatcgacaattccgctgaatgtcgctgcgtgctccggctgcttccgtttcacccccagaaaagcgatgccgaggaaagcggcgaaaataacgactccgatggtggaagtcggtctggctcccgtgaaatcaagaaacggattccccggcagaagctcaacgatttgctgaggcagcgttttggccgtcatatcctcagatttttgctgcagctcctgaccccttgataactcagtgctcccctggtcgatatgaacggctttcagatcaaaggaaagcgccgaaacaattccgactgccgcggcaattgctgtcgtagcgatcaaaattccgatgatcagaccgctgattttcccgatgttatgggtcagtttaagcttcgtaaatgcgccgagaatagaaataaagactagcggcatgacgatcatctgaagcaatttgacataaccgccgccggcaatattaaaccaatcggccgtttgtgccacgacatgtgaggccggcccgtaaatcaattgcagcgcaaaaccgaatacaatgcctaatccgagcgcggtaaagacacgtttagaaaaggaaacgtgttttttttgcatcacaaacagacctgctataaacaaaaacaaaataaaaacatgtaagattacaaataaattctccaaaacaggtaaacactcccttgctcattatccttaaacactatattacatcaattccgatcggtcaagtaagaattgacaatatatgtatttttaatgatttttctcttttctttccatcctttctttagtaacttatataagggtgattgttatgctgaaggaactgtttcttaatttgacgattttaatcacatttaattatctcttcaccgttctttttaaagagtcgctttcacataaagaagaccgtccgatgtttcaattactgaagggggcggtttgcgggcttttaggggtttttctgattgctttcggcttttcttactccgattccatcattgatctcagaaatatccccattatcatcgccgctctttacggaggctgggtgtctacagcagctgcctttatcattatcgtggcaggccgtatcctgatcaatttcaatgccagcgccatttattctatcgccgcagtcggcatgattgcgatactttctgtggccgtattcagaggaaaaaagccgaatcacaaaaatgcgttcgttatgctgctcttttcaaatgttattatcaccctgacgctgctgttacttatgcctgaacagcctgccggggccctcgtttatttttggctcatttctaccttgggcggaatgctgtcgctgtatatcattaaacacgaagccgatgcccgccttttgttcaagcaatacaagtttcaagcgaattatgattttctgacggggatttttaataagagaaaattcgaggaagtctcgcgcgttctgtacgatcgggcgtctcaatccccctcgtctcagctcgcgcttatttatttggatattgatcactttaagcagatcaatgatcaatacggccattatgaaggggaccaagtactgaaggaactgggggcgcgcctgaggttcttactcagcagttctgatccgtcagcccgcatcggcggggaagaatttgccgtgcttatgcccaattgcacgtatacaaaagggcttcacctcgcagaagaaatcaggcacacgattgacgcgaacccgattctgctgacgagcggagatacaattcccgtgaccgtttccctcggcatcgcgcattatccgacaaatacatcggatcctcagacattgcccctgatcgcggaccggatgctgtacaaagcgaaaacatcagggcgcaatcaagtgtgcagcactgaaaaaaaagaatgatcgcccgaagaggaaatcattctttcttttcagtgagaaagccgcctttcaggaaaacaggaatcaggctgccctcatattctttttcaataaacgccgcggtatcatctgattgatacaaagacaggagtttttgcatccgttcatcatctttatcctcagccctgacggcgatcagatgaatatacgcttccttcatttgcgccgatcggatcagcgcgtccttctccgcatgaaatcctgctcttttcgcctcgctttgactgagaactgctgcgtcagcatgttccgccgcctgataggcgttcttttttgtttccgtttttaaggtcagatgcttcgggttgtccttgatcatatcagttgaacccgtaccggtgaatccctttttcaatgtcatcagtccggcctcctgcatgagaaaaagcgccctgccgaaggccgccgcttcaccaggcacagcaatgaccgctccgtccggtatatccttcagccgtttatgttgcttggaatacacccccagcgatgccgcatatgtcgttcctaaaggagccagcttctttttcacatgaggcggcaaagattgaaaataagaaacggattgaaacgcattggcgtcgagatccccgccggcaagcgccaaatcggcctcggcataatccgaaaacgttaccaaagaaagctgcaatccttcctcaccggcttttttcgcgacaaactcccagatcgattgatcagattcattgattccgatagtaattgtccggttcccgtcaggataatggcatgaagtaagtgatatgatcaaaatgaaaagaaacagactgtttataagccgcaggttcaagttgacctactccctatctatttttatgtacagaggctgcaccatggtattcgggctcatgattacatacaataccgattaaaaaaagggttgtcaattgcttccttaagaggctgcaaagcggtttttatcagctgaaaatgggctgttctagtctcaaatcagatttccgtatcagagcgttctcctcttaaaacatgttatttcgaaaaaagttacatttagcagttgttttttcttcgaattactggtagagtaaaggtaattatttttgttcgaactatctttaagaagaaagttttgtaagagttttcgtcttggaagtttgttttagagcaagaatagtgaatttaagcgttatgtcgctttaggaggaaatttcatgttagaaggtaaagtaaaatggttcaactctgaaaaaggattcggattcatcgaagtagaaggtcaagacgatgtattcgttcacttctctgctattcaaggcgaaggcttcaaaactttagaagaaggccaatctgtttctttcgaaatcgttgaaggaaaccgcggaccacaagctgctaacgtaacaaaagcataaattgtttaaaaaccctgccggtgtacgccggcagggtttttttcatctaaaacgaaaagctgttttgcaaaggcaaaacagctttttatatcaggtggcaatatcgcgttttaagaagacgccgaatgcgagcgccagaaaaataacgaagtaaatcacaagcatcacaaccgaaaatgtcatcgtcatcccctctactaaaggagtcccgttcatatattgcgacaaatccgtattggcgaataaaatatatttggtccattcaaatttcgtggcaagaaatacagtcgccgtgtttcccataaccaatagaaaaatagaaaatccgaccgctaatgagctgttccggaataccgcagacagcataaacgccatcgtcgcaagcataaaagcggagacagattcatagacatatgttttagcgaggaaggcgatgatattttgctcaaaaacatggccgtctttgtatacgagatgaacatcagccgcagtatctccccctgtaccgaaaaagaccaatcccaacagagcggagccggcaaataaaatcacaagcatcagcagtccgaacagcagcaccgtcatatatttagaaagcaaaatctgaaaacggctgagcggacggatagccagcagcttgatcgtcccccagttgaactcattcgccacgatgcctgcggcaatgataatcgtaaacagcccggtcaaaacagtcatcatcgaagaatcagctacgtatgaccacactgtgtaccctgtatcctcagggatgttatgatccatacggtattgatttatcgcgacattctgtttcaggttatcaatgagcgtctggtttccggtttccttcatctgctgtttcatttctttgttttcggcctggagctcctgtttccaattcggattggcttcgctcgaggtgaaatggtttgacagaagcgcaaaaccgatcatcgaaacgcctaaaattacaatcatagcccacgtgccgacgcggctgaaaatttttatccattcattatagatcagcttaaacatattgaacctcctctttcgtcccgccggtaatctccaagaaacggtcttccaaagattttgtcatgattttcacttcatataagcggatgttttcacggacgagcagtgaaatcacatcaggcacttcctgttttgacagcttgatctcaatgccgtttgtcttcttcacacagtcaaactgactcagaacggcaagagcctcttctctttgttcaatatggaagaagtatgtatctttatcctcttttccttcatcccttactttttgaatatcgacaagctcccctttttgcagaatgccgattcggtcgcacattaactccatttctgacagcagatggcttgagacgatgacagccattcctttttcacgtgtcagctttttcagatggtccctgatttccctgatgcccgcgggatcaaggccgtttgtcggttcatccagaatcagcaccttaggattatgcagcaggctttgggcgaggccgagacgctgtctcattccgagagagtaggtttttactttgtcatgtattctgtcctgcaacccgacgagctcgatgacctcatctattttttctttcgtaacgccttttaccatccttgcgtactgctgtaaatttttataaccgctcaggaatttgtacagctccgggttttccacgatggctccgacgtgcctgaccgcttttgcatagtttttcgtaatggattccccgcagattacgatgtctccctgagacagtttcattaatccgaccatcattctgatcgtagtggttttccccgctccgttcggccctagaaacccaaacacttcgcccgcccggacggagaagctcagatcatgaataatcgttcgtccttttatcgttttctttacctgttgcagttctaataccgtttccaattagaatcccccttctatttcgtgcgcctgcatgacgcttctgtaccattgcagcacggacattccttcctgttccctaatttcttcgacctcgcgccgttcagcgattttcccttttatgaaaaccatcacttcgtctaacagcgtctcaatttcgccgatctcatgcgtggcgatgacgacgatctggctgtcaaaatcaatataagatacgagactgttgacaatcgattctctgaccgccggatcaagacctgaaaacggctcatccagcagaatgacggatgcttttctcgacagggccaaaacgattttcagcctgccccggctgcctttggacagctcttttatcttctgcttcgctgaaagattcatttccgttaataggttatgtgctttttccagctgaaaatccgggaattgcgaatgataaaatgtgagcatatcaccgacggtcgtccgggcgaaaaacatatcatgttcggttaaataagccgtacgaaacagcatgttcctgcttactgcgcagtctccgatccggacggcgcccgaggtcgggaacgcaagcccggcaagcattttaagcgttgttgatttaccgcttccgttcggccctaaaattccgtagattttacccggagacaatgaaaatgatacatcgctgaccgcgagcctgcggccgtatttttttgttacgcgttcaaaatcaagattcatcgtttgcttcctccgcatattgtttgatcccgtcgatcatttcctcaggagatagccccagctccgccatttcctgaataaagcgtttgaaaacgtctttagtcagcctgtctttcagctccgctttcagatcggacctttccgctacaaaggttccctgtcctcttctcgtctccacgatccccagcctttccatttcactgtacgttctttgtatcgtattcggattcactttcatctgtacggccatctcccttacggacggcagtttgtcccccggtgaaagctcacttcggatcagccggtaatatacacgatcggcaatctgcagataaatcggcttggatgactgaaattcattctccatcattacacctcaacctttcgattcagcagcatagaggccagtgcgagacagagcgccgcaagcacgatcactgccaggaagctgaaaagcgagatgtggacggccttcagctccaccgtccagccggtcaattttgtatagtgaaaatcaaaatccgcatacacttttaccggccataaatcatgttgagatgaagtgaaaggcgtaatgattttatcgtcaatataggtccagacaaacgcaagcacgatgcagatcacccaacggaggacgggaacatgttttaatgagtgaaaaacagtccaaaagacggccacgatcacagataaatacgctgaactgatcagcaggtaagcattcagtccggttaatgtgccggccaggggaatggtgtgttccagcgctccttttgcagaaagcatccggtacatccaaataccgtaaccggtcagcgccagctgcccgatcaactgatacagcagtgaggccgtcagcttggaagccagcagataaaatcctccattcggattgtaaagccacagctgattttttccttctttatgaaggtgatagtacataaaaagcggcgctacaagaaattgaaaaaaccccattgccgtaaaaaagccgaaaatgacgagcggttctttctgacgggcagcgatgacatgggctgcaaacgcccagcaaatcatgccgcaaagccacaccgcgagccaaatccatgaaactttcgcatcttttttcagcaaacctaaaaacgatgtcattctttctctctccattcggatcaagtgtatgagtaacatagtacactagatcatcacgtattacaatatcttcaataaaaaaaagacaaatccgctcttacgcagatttgccttttcaattacttctttttgttttttaaggagagcagcgcatcacgatagctgctatcctgcattttgccgccgctatcaggatcgtttggttcctgatccgtctcagaagtcttaaacttctgaagcgcctgacggtacacatcatcgcccattgtattctttttctcacggggagattcagattttacaacgactggagcatgctcggctgagcgctcctcggccggatcatgcttttccggctgttcggctgtagtgccgatcgcttctctcttttcttctttgacattctgtcctgcagaagtgctgcggacattgaatgtgataagaagtgcaatcacaatgacagcagcaataaccgctataataatggccatataaccctctccttactgtcgtccggcagttagattacctgtgacttggctgacacgtctgccaagcgcacggcctaattgaaggccttcttccgtcatcagcacatcgctgtcaaccgggcatgtgacgcccgcgccgtagtaagagccgtacagcgcgttttcaggaacgttgccgggaagtccgacaacaatcatgccttggtgaaacataggagtgatcagattgtgcattgtcatttctaatccgccatgtgttgtcgccgtcgtacagaatacggcgccgactttatcaatcagctcgccttcagcccacagatagccgagtctgtcgatccacgcttttaagcctgaactgatggtgccaaagtgtcccgggcatccccagataatggcatccatgtctttcagcttgcggatgtctgcttgatcgacatggtcgatcaggacttcagcctcagcgttttctcgtgctccttcggcaatggcttcagcaagatgttttgtatgttcgccttcactatcgtacactacgtaaattttcattcaggaaacctcccattcagatgattaagattccttcacttctttaggggccggaagcaatgacagctcctcttttttcttcgcccgctgtttgtctttccgtacgtcacgcaagaacaggctcaggactacgccgataaccgcaaagatcgtcgcccacataaacgcgtcattaatccccataacgttggaattaagtgaagctgttttgtagagataagaataaacggtttgtttcgccgcatcaagcgacatgttcatgttgaccattaaattcgaaaccgcgctttggaacgactgcatgaagcttggatcagccgtgctcgttttatccgcaatctgcgaatagtgcattgtcgtacggttcgtataaatcgttgtgatcaaacttgttccgattgaaccgctgatctggcggagcgtgttgctcatcgccgtgccgtggctgttcaaccgtgccggaagctggttcattccggctgtcataacaggcatcattaacagtgacataccgaatgcgcggatggcatagacaagcataatgtgcgtgtaaggtgtgtcaattgtcaattttgtgtactggaatgtcgttgcgaccgtgatgaccagcccgataatcgcaagcggtcttggaccgattttgtcaaacagaataccggaaatcggcgacatgatcagcatgacaatcgcgcccggcaatagcaagaggcccgattgcagcgccgtaaagccgactaagttctgcaggtaaatcggaagcaggaacattcctgtgtaaagcgcaacggtaataatgatgttaatcacactggaaagtgagaaaatatcatatttaaatacccggaagtcgagcatcggtttttcagagcgcaattgctgaatgacaaacgcggcaatcgcgatgacaccgacaatgacggtagacagcacgatcggatctccccagccgtcgctgcccgcttcactgactccgtaaagcaatgaggcaaatccgacaatggatagaatcgcacccaagctgtcgagtttgattttttgcggttccaccaagttcttaaagaggaagaacgctatgataataacgattgccccgatcggaacaaggccgtagaacataatgcgccatgtgtaatgctcgatgatccagccggaaagagtcggtccgaccgccggagcaaacatcatcgcaagaccgaaaatccccattcctttccccctgctttcaggcgggaagataagcagaatggttgtcatgaccagcggctgcaggataccgccgccgaccgcctgaattaaccggccgatcagcatggttgagaagttaggcgcgattccgcagactaacgttcccgctgtaaaacagaacatggctacgagaaagaggcttctctgtccgaaccgggtaattaagaacgcagataacggaatcaaaacaccgttgaccagcatgtatccggtcgtaagccactgaatcgtcgtcgcactcacaccgaactcggtcattaagtgcggcatcgccacgttaagaagcgtttggttcaagatcgccaggaataacccggccataagcacaataagcaatgttttaggactttttacttgattatctgatttagccacctaagacaacctcccttcatggtttgatgactgatctgtattattcagagatttttacagatgcgttcataccaggaagcaccttgtcagatgggttgctgagtgaaattttaacaggaactttttgcgttacttttgtgtagttgccgcttgagtttgaagaaggcagcatatcaaatgttgaatttgtcgcataaccgatttcttctactgttccgtcaaatgttgtattagggtcgccgtcaacaattacgtctactttgtttcctacttcaatgtctctaatatctgtttctttaatgtttgcagtgatgtaaaggtgtttcatgtcaatttcctgggcaattgtcgtaccggcttgcaccatttggccgtttttcacttcgtttttcacgattgttccatccatgatggcttttacgtcagcattttgctgtcctttgatttttgcaacaacgtcgtttttgcttacttctttcccctcatcaaggttccagtcagttactttacccgcagcaggagctgtgatagcagccatgtcgccggcaacttttgcttcatcggtttttacatagtgtgtgctttgataatagtagtaagcacctccgcctataattgcaagaacaacaatcaaaccgataatgttggtcagaattaaacgtcctctgttcattttgttttctcctttcgtttcttcctctatcattttgtggaatgatgataaaaatatgtggggatttttttattttccgtttttcactgcacagccgtttgcaagcttcgttaaactttccgcaagcttgcgcaggtactgcagttcagcggtattgagctgccggtataagaccgccgctttttcggcatattgaacagcagctttctttagaagttcttccccctcttcggttaactgaatcataacaacacgccggtcgtcgtgatagtcgctccgaaccattaggcggcgcttatacagaatatcggtcattctcgtgacagacgccggtttcagatcaagcgacaaagccagccttgaaagctgcgtgcttttgctcttatgtattttgaacatcagcagatactgcagcactgtaatatcaaaaggttcaagaactgtctccagaatcattttctgctttttgtaaatcgatctggaagtatcaaacagttgttcaaaactgagcaaagcgagctctgattcaatcaccgtattttcacctcattcccttaataatagttcacaagataaaatattaataaatgaaagaaggtttgtaaagagaaaagtttcattttttaaggattttttttatgccgttttttctctttatttttaatttaaaaaagccgggtgaagaaccgcggccgcacgattcttcactcggctttatatttcatacgatgctttgcttacaccggcttcctcatttttaaaaaagcttttcagcgcttgaaatacgtctgatttctgtttcaggatgtagtatttaaatttatcatctttgacatttttataggcggacatgagggtggaatgcctgttatattgattgacctcaccgtaacagaacagattcgattttttcatgatgtcattgacgagctttacgcaccgggcattatccgaagtcaggttatctccgtctgaaaaatgaaacggatagatgttgtagcgggcggggtcatatttttcatcaattaattcaagagacttccggtaaacggaggaacagatggtgcccccgctctcgcctttcgagaaaaaatcttcttcggacacaaccttcgcttccgtatggtgggcgataaattcgatatcaaccgtttcatactttgtccgtaaaaatcgtgtcatccaaaaaaagaagctcctcgccatatacttttcccatacgcccatcgaaccgcttgtatccatcatcgctaaaacgacagctttcgattccggcttcgtcacatcattccatgttttgtatttcagatcttccggataaatagggtaaaacgacggcttgcctgtcatggcgtttcgtttataggccgacagcatcgtccttttcttatcgatattccctgtcagcccggttttccggatatcattgaactcgatatcggtatggacgatattgtccctttccttttgctgcagattcggcagttctaattcctgaaacagcgcttcttccagatccatcaatgaaacttccgcttcataataatcctcgcctgcctgatcgccggctccctggccttttccagctccctgctttttatctgcgccgtctcttgcgacgacatcgccgacttcgctgtcgccgtcgccttggccgacatgtttatttttatcatagttataacggattttatattcatcaagcgaacgaatcgggattttcacgacatcttttccgttggacataataatgctttcctcagtgacaagatccggaaggttgttttttatcgcttcctgtactttcttttggtggcgctgctggtcgtcaaagcctttgcgatggagggaccagtcttcctctgaaatcaaaaaatttccgctgtcattacgggacatgaattcccctccttaaccgttatggtcgttttacatgtgtattccggcttggtcctgtttatgaaacaagtccggcgaaaagatttatttttatcttatgccggccggactctccaattgacaaacaattgcgaaaaacagacaaaagaacccgtccttttacagacgggcctctcaatgaaatcaaacatcagcggtttaacaagcttccgacatacttcagcagttcattagcgcttgtcgaattatagccgtgttcatctattaaccttgccactacctcattgacctttttaagctgctgctcatccggcgttttggtggaggtcgtaattttcaccacatcttttaagtctgcgaacagctttttctgaatcgcctcgcggagtctttcgtgcgaattatagtcaaagcgttttccttttcttgcataggcggatatgcggattaagatttcttcgcggaacgcttttttcgcgttttctgaaatgccgatctgctcttcaatggatctcatcagtttttcgtcaggattcatttcttcacccgtcagcggatcgcggagcttatttttattgcagtacgcttccacattatctaaataattgtccatgagagttttcgcggattcttcatatgaatagacgaacgccttctgcacttcttttttagcgatgtcatcgtactctttcctggcggcggaaataaaattcatataccgctctttgtcctcggcggagatggacggatgctggtcaagtccttcttttaaggaacgcagcacgtcaagcgaattgatcgattccatattttttctgataattgttgaggaaatgcggttgatgacatagcgcgggtcaattccgctcattccttcatcatggaattccttcttcatatcctcaagatcaacggaattgtaaccttcaacgctttctccgtcataaagcctcatttttttgacgagatcaatatcagagcggttcggttccttcagccgggtcaaaatagaaaacatcgcggccacttttaatgtatggggggcgatgtgtacgtcagaaacatcactttcagaaatcattttttcataaatccgttcttcctctgacacctttaaattataaggaacaggcatcacgatgatcctggagtgaagggcttcatttttcttattggcaataaacgagcggtactccgtttcgttcgtatgcgcaacaaccaattcgtcggctgagatgagcgcaaaccgtccggctttgaaattcccttcctgcgtgagtgacagaaggtgccacagaaatttttcatcgcatttcagcatttcctgaaactccatcattccgcggttcgctttatttaattcaccgtcaaaccgataagcgcgcggatctgattctgagccgtattcggcaattgttgaaaaatcaatactccccgtcaagtcggcgatatcctgtgatttcgggtcagacgggctgaaggttccgattccggtacgtttatcctccgagaagaatatacgttcaacctttacatcctcaattctgccgccgtattcttcttcaagccgcatgacattaagcggagaaaggctgccctcaattctgatgccgtattctctgtagaagtcgtcgcgcagatgatggggaatgagatggagaggatcttcatgcatcgggcagcctttaatggcgtaaacagcgccgttgtctgtcaatgagtaggcttcaagcccttttttcagcatggtgacaagagttgactttccgccgctgacgggtcccatcaatagtaaaatccgttttcttacatcgagccgcttggcagccgggtgaaagtattcctccacgagccgttccagagattcctcaaggccgaacagctcccgcgagaaaaagctgtatgtctttttaccgtcatcctcctcgattccgctgtcttttatcatattaaaaacgcgagaatgagcagactgcgcgaccaatggattttcttttatgatctccaaataatcagcgaacgtcccttcccatttgagacgctgctcttcctctctgtacttttcaattttctttaatatatccataagaacctcctctatcatggttaatgcactagaaataaggtactttgttacaatctatgcggtgacgtgataatacatgcttttcgtttcttaaaaataaagacgttataaggccgtcattgacaagggtccggtgcaccgttcataatgaaagaaatacagtttcatccagactcggacatcaaatggaaaagcaaagaggaggagaaatgatgaaaacgatcattttacttggggtcattctcacttttttagtatccatttttacggcgggttacgacagcaaacctgaaaacaaataacggcaaaagggtgctcttcataaagagcaccctttcctgtacaacataacaatgtttcatatttgaatatgttcttggacagttgatttttcatgagatttgcagcttgtttgatactcgatttttccgattttgcagcccgggccgatttccacatgtttccctctgacgatgtccgcttccgtgtattcgaggtaaattgcgtccccttcgatcaattcagcagaaagcgtgccggctttccgtttaagaaaaccgggtttccgtctgacggtgatcgatgtgccgccgatttctttcacgcggcttcggtcataacgcaaatggatgtttacgtcccccgcgtttaacaatcccgccacattgatacatcctgttacatgaagcagctccgtctggcaatcaccgctgacggtgagactgccttttatatgacaccgctctcccgcggccccgccgccaatttcagcaagtcctttcagcctcatcgtggcgaaacgcatggagccgccgactttcaatgtgcccatcacatttgctgaacgtgctgataaatctcctgcaacttcatgctctccgaaaattttcagcctgttgatctcggcatctccgagaaaaagtcccgtaccgaatatccggcagcgttcgctttgaagtccttcgccgacagttccttcccctttaatgcttacattttggtaggagccgccggaggcgtgtccggctccgtacatttttaaatgactcaatttttttgtcgtttccatcgcagttcctcctatcgtttcacgactttgttaaccaaagcggaaggatcacatgtaaaatcgccgctgtattccacagtcccaatggtgcagcctgcgccgatccgtacatgatttccgcggactgtcttcgcgttcgtgtccgccaattcaatgatgtcaccttcaatcagctccgctgtcagcaccggggccggcatcagcttaaaacgcgtaagcacgctctttctgctcatcactttcaaatggcggcagccgatctctttcacatggctttctcccgccgccagcttaatactgacttcatcggcattcagcaggccgccgatcttgcatttgccttccgaacggaacgtctctgtctcgcaatcgccttcaatcgcggctttcccggatatgaaaatatcatcagctttcacaccgccgccgaaagatgaaaatcccgcgacgttcagccgctccgttttgacatcacctttaatgacacccgttccattgatacggatggattcagcttcggcactgccggaaattttccccgaaccgctgatcgtcagcgtttgcgtcttgacatgtccgtctgtttttccgctgccgttaaacaaaaagctcgcgcactccacatcacctgacaccgtgccgcttccgttgatctctactgtatgaaaacggcctccttttgaacttcctgaaccgttgatgattaatttatctgttacttccattgatggtcctcctgcatccatttcgtttttaattcttccgatgccgcagcaagcgccacccgttcaaccactttgacagtcggttcaaataaaatatgttccgcgtctgcgatgaagcacgtcgttacgccaagctttcggagcatgacaagctccgtatttgctttcagttcggaagcctcatacgttttcagcacccctgccgccaattttccttcctcaaggctgatattgcccgatcgcaaaagtccttcaagcacatataaagacagcagcgcgcgggacgtgaatgtcacgccgtcttcgccataaacttgcagcgcggcttttgaaatcagtcccttttgaagcagctccgcagacgttatattgacatcagtcatttgcggagacagcatttctctcatttcatccaaagacagattttctttcattttctgtatttttgagatgcgttttaatatttccgctctcggaaaaaatgtttcctggcctgtaaatgttgattttcggataaaccattcttcaggaattaaatttttccgtttccagcggtacagctgcccgtatgaaattgatgtttcttccagcaattcttttttagaaatcagttgttcctccatgaatccagctccttcgatgaatgtattgtaacataacactgttacgttgttaagcccataaatataaaaacgccgtgaaccgctgctgtccgtcttttttattcaataaaaaaaacgcccggatgcgggcgttttttctcacgtcaaatctctgtaattttgctggcgcagcgcttcatatacaagaatcgcggccgtgttggacaggtttaatgatctcacatgctcggtcatcggcagacgcaggcagcggtccatattgttttcgatcaattctttcggaagtccgctcgtttctctgccgaatacgaagaaaaagtcttcctccgtatttgagtaatcaaatgatgtgtgcggcttttggccgaattttgtaatgaagaaaaactttccgttctcatatgcctcaaataactcttccaatgaatcatgatatacgacgttgacgaactcccaataatcgagtccggcgcgcttcagcattttatcatcggtcgagaatccgagcgggcggatcaaatgaagcgttgtgtctgttgccgcacaagtacgtgcgatatttcccgtattggccgggatttcgggttgatataaaacgacatgtaatgccacgatgttcacctctgttttttattccgcccaccattatatcattaattacacttttgtcgtatcatccgtaatatgaaaaaacgcatatctgatggaaggagtatacgccgttgaatcctcatatgaccaatatctcattctgctgtcatacgtttgggcattgacaagcggcatattgcttttatctttcgcgaccacgatcgccgtatgattaaaacggccgtccccttcaaaatcatagcaaatgatatctccgggcatcagttcttcggctcttgatacttgcaccgcgcgaagccctgccttggattgggccagatacatcttcatcgaatgcgcgaccgtccagctgtagctccacgagcttgccttcatccaccagcctgagcctctgttcggatgcccccgcatcggtgcttttccggcatgtaaacattgggaaataaaattggtgcagttgtcgctgaaattgttataagcgggatttcgtttattccaaaacttctccgcgtactgcacggcagccagacggtcgtatagaaacgcccgcccgaaatcttcccgttcactccgctcatattcaattacgctgtttccgtcagaaaatcccgccggttttttctttacttcccgatctttaatcaaaagctgatcatagagaaatgcagtccgctcctcaatctgctcttctaagtaaaggtgtccgtcatgctccttgcacaaatattcgaaatgaatcgtgtacatgacgcataacgtgccgtcgtcctcaaggctgcttttgacaatgacggcttttgccttcgctttcacaatgtcaactttccgtttttcaaacagctctttttttctcgtcaggacctcaagatcgccgggctgcccattgtgcctcatctcggttccgttgattaaataatgaagccgggcctccgctaaatcttcaataatatgcttcaagcgctccacccaccatactgttttataaagaaaaacacttgaactcacgccaagtgctttttctctatacatatgtcaggaccggccggttttagtcttatcagaaaccgataacagctccagtcccttttcaatttcccgtatggcgtccacatcctgctccttttgaagcgctttttctaattcccccgcataatcaggatcaccgattttcccgatggcccaggcggccgtccccctgataacagggcgcggatcttggtgcatcaaggccgttaattccggaagagacgaggcatctttaaaatgagccaaagctaaaatcgcattccgctgtatcggcttcttgccgcgccatgatcccgatacatgtccgaatttttctttgaattcgcggttgcttatggtcaaaagcggctttaacagcggctttgcgatttccggatcaggctccatctgcggatgaagatgaaaatctttccccttattaatcggacagaccgtctggcacgtgtcacagccatacagacggtttccgattttcgtgcggaactcatccggcaaaaatccctttgtctgggtcaggaacgaaatacagcgctgggcgttaagctgtccgggattgacgagtgcgccggtcggacacgcgtctaaacattttgtgcacgtaccgcacatatcttcaatcggcacatccggttcaaagggcagattggtgatcatttcagccagatagacgtaagagccgtattcaggcgtggtgatcatgcagtttttggcgctgaagccgattcccgcccgttcagccacggccctgtcggacaattctcctgtatccaccattgacttcgtgcggatatcctcatgtttgctttggagaaaattctccagcaggtcaagcttttccctcagcacgtcatgataatccttcccccaggaagctctgcaaaaaatgccgcgccgcccgtccctcgtgctcctcggcgcatctttcattttggaaggatacgcaagggcgatggcgacgattgatttggctttcgggagaagcaaagacggagtaacccgtttttcaatatccggctcttcaaaaccggataaatagccgagtgattcctgaagaatcagccggtcccgcagactgtcgaacgtatcagccgtcgtaaacccgattttgtcgactccgatgcttttggcgtattcgattaattcctctttcagtttatgaatattcattttttgcacagcctcctttctttgtgatcaggctcccgcacaggtataatagagttttatcatcccgaaatggagtgaacacacttgaacatcagtttagatccacttattgctgaacgggtgccggggatcaaagcggcagccgtcttatatgaacagatcgaagtcgggcctgctccgcaaatgctgaaaggccgcctccgtttatttcaagaatctctttactttgattatgctgacggcggtatagaagagcagccttttgtaaaagagttggcgcgtataatggaacagctcagtcccgccttttcaggacaaaaaacgccgatggagcttatgctcggcgatatttcccgggaacgattcattgaaagtgtgaattcagcccatgataccatactttttttctccttgaaatattcattgcctatcatggcgtatgacgccgcagaaatagatgaaccgatttcgattacgatcggagaaaaagaaagcgtactgtctttctccggcccggacggcgttttcggcgacttcaccggacatatcaatacacgccctgtcacgcccggcacaaggaaaatgctgcagctgatctttttcccgccttcatttcatgccgacgcggcggatgagctgctatcatccttaacaaaaatgtttgaacaaattcacggaggcacgcataccgtctcttggctttcataaaaagacacgccttcgtgtcttttttcacataaaaaaacgcaatacttcgtttatcagagaaacgaaacactgcgttaataacgtatgtatggagcgggtgatgagaatcgaactcacgacatcagcttggaaggctgaggttttaccactaaactacacccgcattaaaattattttttgtcagtaccgatttgatgtttctaatattacatgtttatttttttttcgtcaagggaatgttaaaaaatttgtcgaaaaaaattctttttttgtccacatgttaagttgggtttacattttgttaagagtctcatacaatataaaaaagaagaaaacttgaggtacgcctgatgatgaaaaataaagtaaaagagctgagagccagattcggctattctcaggaaacgctcggaaaagaagccggagccaccagacagacgattgcagcgattgaaaaaggagattatgtgccttcacttttattggcgcttaacatctgccgggctttctccctgccgatggaggaagttttctggctggaggaggagaaaaaatgagtttgaaaagaaaagcgtgttttcaccttgcactctacggattggcctgctggacgcttatttcctttatggaagcggcgccgcggatcgctcagtttttccaaacggaggggagcggttcatttgagctgaatatcactccgtttctgctgtttaccgtttgtgccgcattatatatctatactgaaaagaaaaaacggaacggcaaaaagcacaggcttgtgcccgatgaatttgaggaacaggatgaaagagaacgaatgatgacggctaaagcttgccgttcctcgtatatcgccgtttacttctcattgccggccgcagccgttctgcttttgttttatccgctgattcagccgcatctacccttttttccgattcttttgattttcattctgatgatgattcagcatttggcttatgctttcacttttcataagcacggcaaaaactccggttcatgacagatccggagttttttacattaccagctcgcttttttcaccccgggaatccggcctttatgggccagctccctgaatgcgattctggacagtttaaattttctcatatatccgcggggccgccccgtcaccgtacagcggttatgaagcctgcccggagcagaatcacgcggcagtttgctcagcgcttcccagtctccttttgcctttaattctcttcggatgtccgcatattgttcaacaagcttctgccgcttgagctctttgatcacttttgatttttttgccatttcagcactcctaacaaatcgtaataattacgttttgtatcatatcatccatatgagcatcgtgcaagctaagcgcttaaaaaggcgggtgaatacccgccttcactgccggcatttccccggaaatgaaaccgcagaaagcgctcgccgtcaattatccgccttgcgacgtcatcagactgtcgctttatttcctcttgcaaaatggtcgtttcccattgcttcacccagtctgcgctcaaactttttagtccgttcattctgaaacggcagaagcggaaacacgagttcagccagataataagcttcttccagatgcgggtagcctgaaaagataaacgactcaatgccgagtgcctgatactctaaaattcgagcagcgacagtctgcggatcaccgacaagcgccgtgcccgctccgcctctgaccagtccgatgccggcccagagattcgggctgatctcaagcttcgagcggtcaccgttatggagatcggccatccgtttttgtcccgaagaatcagcgcgccggagcgcagcctgcgctttcgcaatcgtctcttcgtctaaatggctgattaatcgttcagccgcttcccatgcctcttcctcagtctcccggacaatcacgtgaagtctgatgccaaaacgcatcgtccttccttccttggcagcctgttttttaacggtttcaatcttttcttttacctgctccggcggctctccccatgttaaatagacatctgtatgtttcgccgcagcctcaattcccgcctgtgatgaaccgccgaaatataatggcggatgcggagactgctttggcggaaacagcagattgctgttttccactttgatatggtccccttcatatgtcaccgtttcgccccgcatgagtccgcgccagacggttaaaaattcttcagtcgccttataacgttcatcgtggctgataaacataccgtctcccgccagttcataaggatctccgcccgctacgacatttacgagcaaacggccgtctgacagccgatccattgtcgacgccattctcgcggcgacagacggctgcatcagtcccggacggaccgccactaaaaatttcaagtcactcgtttcccccgctaaagcggcagccgtcagccacgggtcttcacatgatctcccggtcggcagcagcacccccgtatacccgagtctgtccgccgcctgtgccacttgcttaaaataaagatgatccgccgttctccctcccgtttgcgtccctaaataccggccgtcaccatgcgtcggaataaaccaaagaatctccatatgaatctctccttttttaataggttacccttcataactgttccgccattttaatagtttccgttcgagcattctgaccaatgcatctgtcagcttgccgacagccgcaaaaatgataatgccgacaaacaccttatttgtctgtgaaaattgtctggcatccataatcatataaccgacgccctcgctcgatcccatcagttccgccaccacgagaccgagccacgcaatgcccagagagagcctgatgccgagcagggtattcggcagagatgccggaagaattaatttcgtcatctgctgataccagttaaattccagcacccgcgcgacgtcaaacagcttcgcgtccacactgcggattccgagaaacgtattaatgtacacggggaaaaaagcccccaatgcgatcagcagaatttttgatgtctcatcaaacccgaaccacaaaataaacagaggagtcacggccaagtgcggaaccgttctgagcatttgaagagacggatcaagatatgcttccgtccgctttgagaaaccgaccagcagcccgaaaacaagtccgaggcccgcgccaagcagaaatccggcagccgccctgtataaactgatctctaaatgaccccacagttcacctgaaagaagaagttcctgaaacgtctgcaagatgacgacaggtgacgggagcaccgttgtcgagacgatgcccagacttgcgataacctgccatactgcgatgaccgcagccgggagtacaacccctttcatccattggtatgaatacttccgggatcttgccagagctttcttttctgattggcttattgcgccggcagccgttgatacttctgctttcattacttgccatcccccgtttcaagcgcttttttaataaatgaattgtcgacaacgtcttttacatgaattttcttatgaatcgcttttgtttgatattgaaaatcagcggtttcctgctgggctttgacaatatcatcattgatcggttcattgagaggctcagtattgttaagcacgtttctgacgactttcggatcaagatgtttgattttcgcatataaagagacagcttcatctttgtgttccttttgccatgcaactgctttattgaacactttcagaaatcggacaacctcatccgggtgttctttggaaaatcccgttctgactaacgtgaaaccgggagaatataaatctgtgctttctccgttcgccaatatttccgccccgtgctgcagcgtttcaatcgacaaatacggctcccaaatggaccatgcgttaactgatttgttttcaaaagcggaaaccgcctcatcaggctgaagctggatgatggtgacgtcatcggcggaaagccctgctttatctaaagctttatagagaaaatcaaagccgctgctgcctttggctacagcgatttttttacctttcaattctttcaggctctgaatcccgctgcccttgtttacgagaatgccatttgcctttaacccgtcctgagacagcccgatctctttaaaatcaattccagccgcctgaccggaaatgaccggtgaattgccgacctgggaaaaatcaagcttatcggcggcaagaccttcaaactgcggaggaccgctttgaaattcgacccattttacttttattccgtcttttttgaaggcctcttcaaaccagcctttttccttggcaatgagaagcgggcttaaactctgctggatgccgatccggatttctttcaccgttttcccgctccctcctgtcccgtctgcactgcatccggctgacatcatgactgctgcggctaaaagaatgatgatttttttcacttcgcttcgtcccttctatatcccggacccatccgcaaaccggaggtcttccgttttctcaaactcagaaagcaccttctgccggacggcctgaaaatccgctgaggtccgattgcgcggatgcggaagctgaatcggcatcaggctgtgcagccggccgggctttgccctgaggatcgccagcttatcgcctaaatagacggattcatcaatatcatgcgtgaccagaatcatcgtcgtttttttctcgctccatatatcaagcagcacatcctgcaaatgttttctcgtaaaagcgtcaagcgccccgaacggttcatctaaaagcagcacctccggctcgcgcaaaagggctctggcgatggcaacccgctgcgacatgccgccggataattcgcgcggataagcgttctccgctccctgcagcctgacaacctcaatcagatcatccacttttttccgaacggccgggtcgttcatattgagatcggcagcgatgttttgttttaccgtcagccagggaaacagccggtgctcctgaaagataaatccctgccggatgcccggtcccgatacattgcggccgtttattgtgacagagcctttataatcggtatcaagaccggcaatcaattttaaaagcgtgcttttgccgcatccgctcggcccgatgacagtcaaaaattctcccgatgcaattgacagctcaatatcattcagcaccggcgttttccggccttcatgctcaaaagctttttcttgtatgctgatggttacagccatctgtcttcccctctctttctgccgcgtgcgatcgaaaaacaaaaaggcccccatctccgattgcttgcagagatgggagccttcggcggtccgatcggcaacccgtttgtttttaaatttgaatatcatgttaattcaaattattccgacttgtcaactgttttttataaggattaaaatacgccctccggcataaccctgccagagagcgcatcggctgtatcacgtatttacttccttttcttgacgggcgattttcaataatgtccgcgcgttgttgccgaaaatgttctctatatcttcttcccgcatattgatttcccggcaggtcctcacctgctcctgaagatatctgtatacatatcctctcggaaatccgttcgaatccgtcccgaagatgatccgttcagcaccgattaattcagatgtcttccgaaacagaatttccaaatcaagcgggtacggcatccacctcatccactgatttgagccggacgtgtcaatatacacattcgggcagctccagcacagctgcagcagttcctgataatatccggcgccgaaatgcggaatgatgaacgggatatcagcatactctctcgcgacgcgatagatggagagcgggttgatgttgcgatggctgacaatgccccccgctcttcctaaaagcccgaagtgaattaatacaggcagccttttgtcagccagatacgtccacagctttttcagcgacggatcatgaaaatcgatgtctgtcagcggcccgaacagtttatatcctttcagaccgagctcttctaccgctcttttcagctcttcatacgcatcctcccgctccaaaggatgatatgcaaatccggtaaatctcgcgggattggcttgaataaacgccgccatccggtcattgctctctgctgttaaaaaattcagcacgtcaatgccatacttatctaattcattctcccatcttgtcatcaaagcgatttcgccgtcatcgccctcaacatcatgcggatcaggaaaatcccaagtcagattcattctttctgaccgctcccggttataatcggaaaatgtcttatcgtttttgccgaaataaaggctgtacggcagatgaccgtgaatatcgacaggtttaaaatgctgccggaaaagcatacaatcgccgcctcccttaccgcctgacaataaaaaaaggcccttatccagtgaagaataagagcctcttgtgtccaagtcagcggtttctattttttctcatcttaaacccattattcccgtcagtcaagtatgctttcaaacccaaacccttttttcgataataaaaataattattttataatcattataaaataatattgactttttaatgataggtgatattatatttttataaatctaaagaggtgatcacatgagttcaaataaattgacaaccagctggggcgctcctgtcggagataaccaaaactcaatgacggccggcgatcgcggtcctgctttaatacaagacgtccatctgcttgagaaattggcgcactttaacagagaacgcgttcccgagcgtgtcgttcacgcaaaaggcgcgggcgcacacggttattttgaagtcacaaatgacgttacaaaatatacgaaagccgcatttctgtcagaagtcggtaaacgcacgccgctcttcatccgtttctcaaccgttgcgggcgaactgggctctagtgacacagtgcgcgacccgcgcggatttgccgttaagttttatacagaagaaggaaactacgacatcgtcggaaacaatacacccgtgttcttcatccgcgatgccatcaagttccctgactttatccatacacaaaaaagagatccgagaacacatctgaaaaacccgacggccgtttgggatttctggtctctgtcaccggaatccctgcaccaggtcaccattctgatgtcagaccggggcattccggcgactcttcgccatatgcacggattcggaagccatacatttaaatggacaaatgataaaggcgaaggcgtctggatcaaatatcactttaaaacagagcaaggcgtgaaaaaccttgatgttaatacagccgcaaaaatcgcgggcgaaaatcccgattaccatacggaagatttgttcaatgcgattgaaaacggcgatttccccgcatggaaattatatgttcaaatcatgccgttagaagacgcaaacacatatcgctttgatccgtttgacgtcacaaaagtatggtctcaaaaagactatccgctcattgaagtcggccgcatggttctgaaccgcaatccggaaaattactttgcggaagtagaacaggcgacgttctctcccggcacattagtccccggcgtcgacgtctcacctgacaaaatgcttcaaggccggttgttcgcataccatgacgcgcatcgctaccgtgtcggcgcgaaccatcaggcgctgccgatcaaccgttcccgcaatgaagtgaaaaactatcagcgtgacggacaaatgcgttttgatgataacggcggccgctctgtctattacgagcctaacagcttcggcggcccgaaagagtcacctgaagataaacaggcggcatatcctgtatcaggtttcgctgacagtgtaagctataatcatcatgatcattacacacaagccggcgacctgtaccgcctgatgagcgaagaagagcgcgcgcgccttgtcgccaatatcgtcagtgcgatgaaacctgtggaaaaagaagaaattaagctgcgccagatcggccacttctacaaagctgatcctgaatacggcagacgcgttgccgaaggactcggactgccatcaccaaaataacatcaaaaaacctgccggtctgcccggcaggtttttcctgtttattatcaataaaaccgtttttttctcaattatacgaagtggcatgccgcaaaatgatgaagccctttttctgacagcgccggacttttctcagcacatatcttcttggctgccgggcatctcgttcggaatttacagcctgaaggcggatcagaggggctcggtatatcaccctttaaaattatccgctcccttttcgctccgggatcaggaacaggcacggctgataacagcgctttcgtataagggtgaagcggccgtgaaaagagctcctcctttgacgcgtattccacaatcgtccctaaatacataatggcgaccttcgtacataagtgctccaccacgcttaaatcatgagaaatgaacaaatatgacagcccgtgctgtttttgaaggctgctgaacaaattgatcatctgcgcctggatggagacatctaacgccgccacgggttcatccataatgataaattgcggcttgagcgccatcgctcttgcaatcacgatccgctgccgctgccctccggaaaattcatgcggataacggtcgataaagtttgcggaaagtccgcaggcttcaagaacttccgccgctttatcacgcgcattccgcttcaccgccaattgatgctcgatcatcgcttcaccaatggcttctccgatccggcgccggggatttaaagaactgaacggatcttgaaagatgagctgcgcttctgatctgaaagttttgagctcgcgccggctcatccgaaacacatcacgcccctgaaaaaacacctctcccgctgttttttcatgaagcctcaaaatggtcttgccgattgatgactttccgctgcccgattctcccgctaagccgaacacttctcccttttctatcgtaaaactgacaccgtcaaccgcttttacgggatttttgcgggtctttctcatccccccatgctcctcgtaatattttttcagccccttgacctccagcaacacatcactcatctgctttctcctctctgtaaagccagcacgccgcctgatgccccttcccgaattcagtaaaatgcgggctcgatctccggcatatttccgtgctgtgttcacatcgctccgcaaaataacaagacgatcccgacaggtccgcaagctcggggacctgccccggaatggtgtacagcatctcccttctttgaccgataaccggcttggccgcgagcagccctttcgtatacggatgcttcggatcagaaaacagctttgcaaccggtccttcctccacaatttttcccgcatacatgacaatcacataatcagccatttcagcaaccacgccaaggtcatgagtaatgaataaaatagacgtgcggaattgctttttcatatcccgcaataaatccaatatctgcgcctgaatggttacgtcaagcgctgtcgtcggctcgtcggcaatgatcaatttcggttcgcagcttagcgcgacagccgtcatgatgcgctgcagcatgccgccgctcagctcatgaggatatcggtgcataacctgctcggcatgcgggatctccactaacgtgatcagttcaacggccttccgccacgcttctttcttactcagcaacaaatgttcgcgaatcggttcggccagctgctcaccgattgtaaacaccggattcaaagatgtcatcggttcctgaaatatcatcccgatttcgctgccgcggattttctgcatgtcttttggtttcaattccaacaggttccgtccggaaaaatgcaccgctccccgttcgattctccccgtctcgggaataagctgcataatggacaatgacgccatgcttttcccgcagccggactcccctacaatacaaaccgtttcctcctcatgtatcgtaaagctgacatcgtccacggcctttaccgccccctcctctgtataaaaagccgtttccaaatgcatcacttctaaaagcggttttttcatttcattttcacctgccgttttaccttaggatcaaaagcgtctcttaaaccgtctccaagcagatgaatcgccacaacggtcagaaaaatggccgttcccggcggaatccacagccacggacggagtgtaaaatccataaaatgattcgcagcttccatcatgtttccccaagaaggtgtcggcggagcaacgccaagcccgagaaaactcagcgccgattcactcagcatcgctcccgccacatgcaaagtcgccgctaccagtaataacggcaatgtattgggaagcaaatgatagaggattttccgtttatcactaagccccaaaacttccgcggccatcataaacggctgctccttcagcgacaaaatctgtccgcgtacaagccgcgccagaccgggccatccgatcaagcttaacatcatcataatcaggtacattctgtgttcagaaggcactttccactccgacatcaccgcagccaaaatcaaaagcagcggcagtcccgggatggacatgagcatatcagcaatgcgcataatgatcatatcagcggctccccgataaaatccggccgcagccccgagtaaagaaccgatgacaagcgacagcaccattgaagcaagccccacagtcagagaaatctgccccgccagcatcagcctcgtcagcacatctctcccgtactggtcagttcccagccaatgatggattcccggctgctgattggcatttgaaatatccgtccgatctgttatgtacagagaaaaagacggcccgataaagcacaataaaaacataaaacataagaaaagaagactgatgaccgtcagcttatgctgcagcaggcggcggtacgtctgcttccaaagagaaggcggcacccctttttgttttttcattccgaacaccccctatttcagcctgacccgcggatcaaccgcggcataagcgatatccgccaagaagttccccacaatcgttaaacaagacaaaaacaaggtaaacgccatcaaaaccggataatcacgataatgcacagattccagctgaatacgtccgacacccggccacccgaaaatctgttcaataatgatggctccggaaaacagtcccggcagttcaaaagcaagcagagtgatggccggaatgagcgcgtttttcaacgcatgtttccagatgacggtgcgctctttcaatcccttcgctctcgccgttctgatataatcctgtctgatcacgtccagcatgccggagcggaaataccttgtcagcgagccgatgccgagcatagataaaatcacgaccggaagaatcatatgtctggcggcttcaagcacgtacgaaaaacctgtactcgtgcttccggtatcaatcatcccgccgacgggcaatattttcaaatccaccccaaaccacttaataaacagaaggctgataaaaaaagacgggaacgccatggaagcaaaaacaagaaacgtcacgatcccgtcaaaccatgagtatttcctgacagcggatatgacacccgttatcatcgcggctgaccatgtgacaagcaacgccaaaaacgcgacaaaaaacgaattccagacatatttccgaagcagtgacaggacgttctcctgatatttcaaagaaaacccaaaatctccgctgagcacatttccgagccatgtcacatagcgctgccaaatcggctgatccagcccgtaaagcgcttttaactcctgcgctctttcaggagtcaggtttacattggaatcaatatagtcgcccggcagcatggcgaataagaaaaaaataataaaggacgtaccgaataagatcacaagcatttgaatgaatcgttctgcggcataccgtttcacaaaaagcccctcctttccgctgaaagggcaaaatccccgggatgcaccgggtattttgcccaaccgttctattgaattgagacatttgagagacttgaactgattccagaataattgtcaggctcaagcccttttatttttccgctgaccgcccttgcgctctgacggtaatgaatcagaatgtaaggcgggttttccccgagctcccggtacagctggtgataaatctcttttcttttgctgatatcaagcgtgccggctcctttctctatcagccggtccgcttttggattggaataccccgttacattattgggatggccggaagccagcttttccaccgtgtcattcggatcaagaatctgcgaggtggaaacggcggcaaggtcatattgtttgtcatttattttcgctacttctgtattaaaatccatcacttccggttttaatgagattccgatgtccgcgtaattttctttcgcgatcgggatgaaatcatcatctgctttagacgtgtaatagctgatttcaagctttttgccgtttttttcacgtacaccgtctttgcccgttttccagcctgcttcatcgagaagctttttggctttttcagggttaaacgcgtaccgattgacatctttgtcatcataagcccacgaaaccggagacaccggcacattcgcgacttctccgtagcgtttaaagcggacatcgacgattttttgacggtcaagtccgtaaataagcgcctgggacacttccttatcttgaaaaggcggacgcttgtgattgacgtacacaagcccgtaatcattcacgacagatacgcttatattggcaaaaccgagactttttaaatgctgaaccgtatcatcatcaggtgaaaaagaagcgtaatcaaggtcacccgtttcaaacagctgaagggaagttgacggatcgataattttataaatcagcttttccgttttcggttttcctgcataatagtgttcattagcctgatagcgtatttcctgtcccggaaggtattctgtaaattgataaggtcccgctccgagcggtttggcataaagctcttttaaatagtccagtttgccgaattgataattctttccgtagtaggcttctgacagcacctgcccgcccaaaagaagcagcgacttcgcactgactttctcagtcgtgatttgaatggttctgtcatcaaggacacgaatgccctctatcgtctttgcctttccttctttgtaagccttaccgcctttaatataagccgtggtgatatcttcatagcccgcgtatgcaggatcatgcaacagtgttaaagtgaatgcggcatcctttgcggtcagcggtgaaccgtcgctgaaaacgagattttttcttaaacggaacgtgtatgtaagctgatctttggaaattttccagctttccgcaagagccggggcaggcttccccgttttatccagtttgactaacggttcaaaaataggatctgtcgcatttccgtcccagccgttttcgtaaaagtacggcagaaacacaccgcccggcgcggaaatcccagcaacaaaagtgtcagttctggctttcgatttagcgggaatcgccgccggatgagaagctttaaattcctttgtcttgacatgggcaatacgtgtttcttcctttttatccgccgcagatgacggttcttccccggcgctccctaacgcgcaccctgataacatgatggataccgacagcgcgagtaccgttgtttttatcctccattttctctccttcatctttatcgaacccccgcatgcttttcatctatctttatataaatctgctccatctgttcctcatttctcataatctcccgtttgtttttctctacaagcagttcgaaattcaatgtgtgttttctatacttttttcgttttttgctctttttgcgcacatgtgataccttttttaacgccacttttcatccctccgctcttcatttcattcatgactttcacgcaaaaaaggcccttatctgtttaaaagataagagccttcggtgatccgatcagccatcgtttggaaatatgtaatgattatgttaattcatacaatacctacctgtcaactacaatttaaaatatcgtttccttccgggggttttcctcatacactctctcatttttccgcatatgctagaaaacatagcagagtacaagtgaaagtgagtgagaatgtggaaaagacaacattgaccggccgcatcgtcaaaaaagatgacccggactataatgctgcgagaaccaatatcaatttaagcctgcaaagatatccagacatcattgtgttttgtcaaaacaaacatgacgccctcaatgcggtgagatgggcgcgtgagaacaatgtgcctttccgtatcagaggcggaagacacagctacgaaaatttttccctgttaaatgacggactagtcattgatctcagtgaaatgaagaaaataagagtaaatgaggataagcggctggtctcgattgaagcgggagccgaattgggggaagtctaccggacactttggcggtacggcttgactcttcctgcgggaaccattgcgaatgtgggaatcacggggctgacgctcgggggaggaatcggatatttaacaaggacagccggacttacttgcgatcgtctcctccagctcgaaatgatcatagcggacgaaaaagcgggtgctgacttgatcacagtcaaccgttcaaagcactctgatctattttgggcgtctcagggaggagggggaggcaacttcggcattgtcacatccatgatgtttaaagccgtaccgatctcgtgcgtgtctgttttttctgtcacttggggctgggatgattttgaggaagtatttaacacatggcagcgctgggctccatttatagacaaccggcttacctcatcaattcagttttggcctaaggaagtaaaccgcatagaagcgctcggtcaatttaccgggacaaaagatgagctgaaagaactgctggctccgttaatgaaagcgggaaaaccgacaagcggcatggtcaagacagtgccatttattaaagcggcagccttttttaacagcccgggaggcaatcagccgcaaaagatgaagcggtcaggatcctttattgaaaaaccattatcaacacgcgcaatatccactttaaagcgctatttagagcacgctccgaacgaaaacgccagtgtctggcagcaatctctcggcggggcggccggacggatcgctccggaccaaacggcattctactatcgcaacgcaatcattgcccaagaatatattacaacttggacatctgctgaagaagaaagacaaaatgtccgctggatcgaaggactgagaacgtccctatcaagagaaacgatgggagattacgtgaattggcctgatagagaaatcagaaactggctgcaaacgtattacggagaaaatgttcaccgcctccgtcaagtcaaaacgaaatacgatccggaaaatatattccgctttgaacagagcattccgccgcttcgccgttcaccgtttttctaaaaaagatgaagatgggcaaactccatcttcatcttttcttttattgatataagcggcttcccttctctgcaaactcttttgctttttctttcagcccttcgttgacggcctcgtcttcagtaagtccgttttccttcgcataatcacgaatatcctgagaaattctcatactgcagaacttcggaccgcacatcgaacagaagtgagctgtttttgcgccttcagccggcagcgtttcatcatgatattccattgctctttcaggatcaagcgacaaatgaaattgatcacgccaccggaattcaaaccgcgccttagacagagcatcgtcacggatctgtgcacccggatgccctttagcaaggtctgcggcatgtgccgcgattttgtacgtaatgacgccttctcttacatcatcacgattcggcagccccaaatgctccttcggcgtgacatagcaaagcatcgccgtcccgtaccagccgatcatcgccgcgccgattgctgaagtaatgtggtcataacccggagcgatatccgtcgttaatggcccgagcgtgtaaaaaggcgcctctttacaaatttccagctgcttgtccatgttttccttaattttatgcatcggcacatgacccggtccttcgatcatcacttgcacatcgtgcttccacgcaatctccgtcaattctccgagagtctccaattccgcaaactgcgcttcatcattggcatccgcaatcgaaccggggcgaagcccgtcaccaagagaaaaagcgatatcataggccttcatgatttcacaaatttcttcaaaatgcgtgtacagaaagctttcctgatgatgagccaggcaccattgcgccataatcgccccgccgcgggatacgattcccgtcgtgcgtttagccgttaacggaacgtaacgaagcagtacgccggcatggatggtgaaataatccacgccctgctccgcctgctcaatcaatgtgtcacgataaatgtcccacgttaaatcctcggcaatgccattaactttttcaagcgcctgataaatcggcaccgtccccacaggcacggggcagttgcggataatccattcacgcgtcgtatgaatgtcttttcccgtggataagtccatcatcgtatcggcgccccagcgaatcgcccacgtcattttttcgacttcttcttcgatagaagatgtaacagccgagttgccgatatttgcattgattttcacatgaaaattccggccgataatcatcggctcgctttccgggtggttgacgttagaaggaataatcgcccgtccgctcgccacctcttccctgacaaattcgggagacacatgctcacgtattgcgataaactccatttccggcgtaatgatgccttttctcgcataatgcaattgtgttacatttttccccggcttggcccgaagcggtttccgctgtaggccggggtattcggcggcacggccctcttttttatagccgttgtcttcaggtctcacggtccggccgttatattcttctacatctccgcgcccggtaatccactttgtgcggagcgcccccagcccttcatgaatatcaatctgtacatccgggtctgtatacggcccgctcgtatcataaacacggaccggcgcattctcctcttccccgaatgcccctgtagtcgcactcaggctgatttcccgcatcggcactcgtatatcgggcgaagaaccttctgtataaacctttttactgccggaaaaactcgacataatggaaatgttcgcttgctgtactgattgattttgcatacaaatctctcctttatcatttgaataacagaaccaagctcagcaccagcacaaaaaaaccgggttcaaagaagaacccggtttttgcagtcagaaagaaactattattgttttcatcaacaataataaaacgtttacttccccacgctggtacgaaccagatcaggtccaaagggttaagaagccgccgcttctctctcagcccgctcagacgggcacccccagtaactattgatttcgctctcatcgtaacataagttgtgtacaaaaaaaagcatattatcaaaattcagataacggtacggtcataagctctgtttcccgaacgcctttttcggtattaaaaacccgataaccctttgcggtttcccgggaagagacagcccggaacagctgaccgtctttataatgaagcgcagcgccgtcatcagcggcataaccctccctgagtttcatttctgaaatcagacggtgatacaccggccggcgctccgcttctccgtcatagtgcggacaaaagcttcccggcaaaaatcctaaagctcttaactctctcaaatctccagccgaatccgtcaatccttcttcataccagcaaatcgccccggcgctgagacccgccaacatgatgccgttttcccaagcctcacgaagaataaggtcaatcccccactctttccataagacaagcatattgcgcgtatttccgccgccgacatatataatatctttcttcatgagaaaggatctgagatcagaacccggcggtttaaacagcgacaagtgatccggctcacaccgcagcttttgaaaggcctgataaaacctgccgatataattctccgaatctccgcttgccgtcggcaaaaaacaaattttcggctctgaccgcgccgactgctctaaaatatactgatccagcacaagatgatccggctccatggaaaagcccccgccgcccattgcaataatctgcttcaatgtcatcacctcttttttcctctagtataacagctcataaaaaggcgttatcccaatttcggataccgcctttaaaaagtatttgttatctgaaaaatgaaaacgcaccgtataacacaacggagatccccgcggcgataagcgctggaacaagcttcgaacgggcatacttcacaacatcgatccccaacaccgtacaggttgtcaccgtattatcactgagaggagaagcaaacgctccaaatgttccgctcgcaaacacggccccgatcgctaataataagctggtatgtgactgaaccgccagcgttacgccgagcggcattaatagcccccaagtcccccaggatgacccgataaaataggatataacagcccccagtataaaaagagacggcgcaataaacatatgagggatccatgacgttaaatgagaagtaacatatttcgagaatccaaggtcttcagatactgctgttacggcccaaatcagcgataacataataataacgttgaccaattcgtttccgcccttaataaaatgggtaacaagctcgcctgcatgaaaacgctgaaacataaaaagagcaaatgctgcaataaccgctgccaataatgcggttaacatgacgccaagcatatcgcttttgataaaagcattcaaaaacccttgtgcttttgaatggccgtcccaccagctgagaaagagtgttaatagcaaaaacagcccgatcggaatgattaaattccacggccgaatcggtgtttccttaatataagcacggtgcgccgaatccagctcctcctgctggtcagcatgctcatcacttttgaacattcccgtatgttcaccgtgaaaatctgagatcgtccctgtttccatgttgaatgaacctgagccttttgaaagcaacacaccgctgttccgcggaatcggttccgtatttttgttatgtttgcgagcagaagtttgtccgctcttttctgttttttctaagctttcgtccgctttttgtttcttaaaaaagcagtaataaattccgactactataatcacaatggagaaaaaattgaagggaatacttttcacatacaccgtgtaagccggctgatctattcctgacgttttaagggcctgtccgataatggaaaccatgtagccgacaaatgccgttgctatcggaatcaaggcaatgacagggtttgccgtaaactcaatggcatacgcaattttctgtttcgacaggtccagacgcttgcttaaagctttcatgatcggtgcaattgtgacgatgcgaaagtccggttcactgaacgtgccaaatgtcgacagccatgcaagcagcatcgcaccttttttggttttaacttttttactgatcaaatggacgaatccttttatcccgccggtcagctttataatccctacaaggccggcaaatgaatatagaaacacaatgattctaatattattggtgacgacaatgttgctgattacatattgaaccatatgctcaatcccgccaagcaagctgggatgcaaaagatagcttccgaccagcaaaccgacaaacagaccggactgcacttgctttgtaatgattgaaatgggaatgaccagaataaatgggataagacaagcccaagtcccttccataaaaaacacctctttcaaagaacttcttgttagtatctttgaaaaaagcggatttatacaattgctcgcgtatcatgttttcacaagccttggaggatattttcacacaacaaaaaaggcttctacatattgtagaagcctttgtataccggtggccggggtcgaaccggcactccagaaggaacacgattttgagtcgaaaagttccttctgcacctaattttattatcgttaatttcccggtggtattaagtaattctgcagataatttaagtctagaataattttgtattaacacgacttgttcttaacaatactatattctgcagagataaataaagaatatttttgtgcattatgttaccagggacaatattgtaacgttagacatgttttaaaattattgcctttatctcttcataaacttcaatattctcaaattctaaatcatctagattatgataaatttttctttcaaggataatccagtaggtgcttccttttttcattttattttgtacgaaacctcttaagttatctcctattgcttcttcaattgaaaaatctttaaagaatgacctaagcgttctattagtaatcagtaacaattgcttattaaggttctgattattaaagatatctttaaaaacttcaacatttattttgtcggcagaatcgtattccttatctgcatgtttattgaccatttctgtaattagtaaataatatgttgcaataaaaaggaatgctgaattaactctaaagtcatttgatccactcttatattttagttcttctttagcatacattaaaattaaataaggaaagagaaaatgttctaaaggtagacctttagtttcttcattcattatatctttccacctactacctactggagtcaattcgttagctcgcccataagctacattcggcattagttttatagcagctgtaaaagattgaattacttcttttgcaggcagaacgtattttttctttctattaacacttccaagcaaataattataactatcattacctctataggactcttgttcttttcgatctaaagttatgaatgcccctctttgtatttcataaaaataacccaaatttttcattcgatcttttaagccattttgaaatctgtctaaagcataaaaatccagccctctaacagcattttggctatttgtgtaccttgtaatattgtctcttaactctttcttttgagattcctcagcacttcgtttagttttaatcactttcacaagcaagtgtccattggattctaaagcagagagttctttattggtcttgtgcttatagaaatcccccagagttttggcagtttggcacccattaactatttgcggtgctttcattactaaactccccatagtctcatagtactcatcacaaaccacagtaaccccattattgtaataccaaaagttctcaggttcatttcttatagtatctttaatacctttgttaattttagtactctttagatagtttcttatatttgaatggaagagaaggttttcaccttcgttaacaaattgagaaaagtctttaactcttacttttgctacagtcgtttcgaaagtagagaaattctcttctatattcaacctgaacgttttttcacgaaagtcttttggtaacagtcccttttttatttctatactttcctgaatatcatctaaatcatgtaagaagaaatttaaattcttaaattccatactaagatgttttaagttggattttatttgcactctttcccaatcacttatatggttgttcgtaatatagtaacaatttatagtctcatcattctgatatgactctctaacatttttacatgcttcttttacagaatctctttctgtagttggttcttctatacaaactcgttggcaatcagctataaacctttgtgtggagtcaatattatgggatgtcttatacttactttgtaataagtgaacttcaccgttatattcaaaaaccgcgtctaaaccgttatcaaacttcccacctatttctttagcttctgctacttcgtcttctcttaactcgaatatgttataaagtatccactcacaaaaactgtccccgacacttacagagtcattacttccacgctcactaagatactcttctatagattcttcaatttgattttgtaaaattaggtcgtatttgttcttttttgctacacccacactcatctctccttaggtaataacttcacaggataattttaacactaaatctcttaaaaaagcacgtaaagcccttaagcgagcattgatagtaattatcctgttccctttataattcttcatgtacagtattacattttcctttgcgtgttcttcagtaaagttgtacggatttaatagttgagtatctattctttgatctcttaagtttatcaaaaaagcactaaattcattcgtgtattattttatagtgtgtgatcttaaattttcgcaactcacagtttattgcctcctgaaatgattctacatatgactttgtttcgctttctaagatacccaatcccttttcgtctaagatgtttttacatctagccatcatgacaattcctctttctctgtgaacacgattagtgcacacgatttgaaattatattgtcatgtgaataaaagccattaaaacaagaaaaaacgccttcctacactactgtagaaagacgttaaaaacgttaatattacttaattcttctttaattgacgttttataaagttaataccggtggccggggtcgaaccggcactccagaaggaacacgattttgagtcgtgcgcgtctgccaattccgccacaccggcatgtaattcgtcgtgttcaaccgacgtatataaatataacatgtatttcataaaacgtcaacggttttagcaaagttttttaaaaggtaatgcagtatatacgatacaagcaagaaacttatattgatagtcattacgtttttattatataaaaaaagtgatctgcaatatgcaaatcactctcatatatgttttataatgtgaaaactgatgaccaatttaacatagttcgttcaaagttaaattggtgccgagggccggacttgaaccggcacggtagtcacctaccgcaggattttaagtcctgtgtgtctgccaattccaccaccccggcaatagaaaggcgacacccggattcgaaccggggataaaggttttgcagacctctgccttaccacttggctatgccgccgtaatttggagcggaagacgggattcgaacccgcgacccccaccttggcaaggtgatgttctaccactgaactacttccgcaacatgtaaaagaacttaatacatgttatgctgttgtttttaaaaaaatgcaactgggctagctggattcgaaccaacgcatgacggagtcaaagtccgttgccttaccgcttggctatagcccaatgataaaatggggcgattgatgggaatcgaacccacgagtgccagagccacaatctggtgcgttaaccacttcgccacaaccgccataatctgaagatgaataaataaaatagtggcaggggcagtaggaatcgaacccacaccggaggttttggagacctctgttctaccgttaaactatgcccctatttataaaatggtggaggggggcagattcgaactgccgaaccctgagggagcggatttacagtccgccgcgtttagccacttcgctacccctccatcatttagagtgccggccagaggacttgaacccccaacctactgattacaagtcagttgctctaccaattgagctagaccggcaaatggtggctcgggacggaatcgaaccgccgacacacggattttcagtccgttgctctaccaactgagctaccgagcctttttataaatggcggtccggacgggactcgaacccgcgacctcctgcgtgacaggcaggcattctaaccaactgaactaccggaccatttttttggttgcgggggcaggatttgaacctgcgaccttcgggttatgagcccgacgagctaccgaactgctccaccccgcgatgataatggtggaggatgacgggctcgaaccgccgaccctctgcttgtaaggcagatgctctcccagctgagctaatcctccatcatataagtgacccgtacgggattcgaacccgtgttaccgccgtgaaagggcggtgtcttaaccgcttgaccaacgggccctggtattttttcgtttgttatgtattgataattagtggcggagagcaagggattcgaacccttgagacggggttaccgcctacacgatttccaatcgtgctccttcggccactcggacagctctccataaatggctccgcaggtaggattcgaacctacgaccgatcggttaacagccgatagctctaccactgagctactgcggaatgaagtctgcctggcgatgtcctactctcacagggggaaccccccgactaccatcggcgctgaagagcttaacttccgtgttcggcatgggaacgggtgtgacctcttcgccatcatcaccagacgttttagtgacatgtattattatactatgtatttcagaaaaagcaagagtttttttaaaaattctctcaaaactagataacagtaagcatacattcaaattggttaagtcctcgatcgattagtatctgtcagctccatgtgtcgccacacttccacctcagacctatcaacctgatcatctttcagggatcttacttccttgcggaatgggaaatctcatcttgaggggggcttcatgcttagatgctttcagcacttatcccgtccgcacatagctacccagcgatgcccttggcagaacaactggtacaccagcggtgcgtccatcccggtcctctcgtactaaggacagctcctctcaaatttcctgcgcccgcgacggatagggaccgaactgtctcacgacgttctgaacccagctcgcgtaccgctttaatgggcgaacagcccaacccttgggaccgactacagccccaggatgcgatgagccgacatcgaggtgccaaacctccccgtcgatgtggactcttgggggagataagcctgttatccccggggtagcttttatccgttgagcgatggcccttccatgcggaaccaccggatcactaagcccgactttcgtccctgctcgacttgtaggtctcgcagtcaagctccgccatatgccgtggtcgataatatattggatcggaactttcagtctgatcgtcctcttgaaaaactagtaacggacatcacatatttgccttatggacagaaacaattgtacctttccagtatattagatttatacaatggagaagtgattgcttttactattggggataagcaggacacagcctttgtcttagacacacttgatcagctaccaatgctgcctgagaactgcgtgttacatagtgaccaaggttctgtgtatacatcttacgagtatcaaaaagctgttaaaacaaaaggcattaccatgagcatgtcccgcaaagggacgcccgctgataatgcctccatcgaatcgtttcattcctcgctaaagtctgaaacgttctatcttaacagcattgatcgaactacgactgccatcgtagaacgcactgtcatagaatacattcattattataacaatattcgtattcaaaccaaactaaacaaccaatcaccgataaactatcggcaattggctgtttaaaaggtgttttgacccctgtctcaaaaacggggggcagtcccctagtcatcctactttttatcttcttccaagtagtataaataaccatctcatataatcactacattatgaaaacgtaattctgaattatactttattatgattttttcttttaaacataggaaactgcaccaataaatttaaatgaatagttttttgcagttatttctttctccctgccgtcatattcaaaattatataaaagaacagcagcattgatttgatcagggagtgtggtacctactatgtcttcgaaacgaggtaagatgacactatcgtatgaacagccgtcaattagtgcaggtaaattgttacgattattttcatgtgcaactttttctataaaatcttcatctaaatcatcgatatctatatcaaagtcaattaaaaattgggaaggaagaaaatcaccctcatcttcattgtaaactaattcaacatatttacctaatgattcattatcctttatacttccgatccacaatgatacgtaattttgacgttccatataaacctcctattatttaatcctcaatccttttggcagggcttccactccacctttaagtctatagtttgcccaattattcaaccttcggacaaatatattatagtttagagatgaatcaataattcccagcaattcattatgggcagctgtagagcccaatcccccgtgtttaccaacaggatttacgaactcaacttcgtttatggcagttcttaaatctcttatttgttccgctgtaatattccaatgtttaaaggtaggagctcgggaaactaaatgccattcgtgcattccaccgggtgctcttagttgtctttcaattgctcttctaactcttttatctgcccaaagttcatcaagttgttttgtggttaatgagttgaaccaattattaaattcaccactttttactgtaggaactattgtttttctaggtttctttacattctgggtttttattatctcagtttcttgtaaagctttcgacttctgtccttcaatctctttcttcaaaagcggtgtatttttcacattatgcgtattctcaatatcctggacaattcctgcaaaagctggttgatttccttttgataatgaattggtgaaatctttagttttctggatacctgtcttcacatgttttgcagctgctttttctccagcttccaagacgttatccactttggcggcgcctgtttttgcgagcttgcttgttacttttacagctgaaccggaacctttgagtcccacaatgctcccgatggcgtaggtgatgtaatgtgatcttgaatacgcatccccgttaaccattttatcattccacgaatccgccaggtttgtccatatgatttttgcgtaggagggcgtgttcaatacagctgatatggttttagcgactttttgttcatcagagagatggtaaaaatcccatgcgccgacagcgagatctttgacgccggttatggtgtctttcccgacatcataaaggccgacgcctattcctttaacgatatcccaagccgtttctccgacttcttctagctgttttgcttgttcaagctgcatcacatatcccacctgagcgggttcaaggttttcatagccgattttcttcgcgatttctaagtattcatccgggtcggttacaccatcagccagctttttcttcagatccttgatttcacgctctttcgcttcttcctttttaatcgtcaaataagcatccgagtgccttgcgatatcgccttttttcttatgaatatcactttcacggtacgctttggcgttgtagtgaagcggcgtggcgctttttcctttgcctgtggcgttttgaagctgctgaaagtcggcttggatgaaatgttcgttcgcttcggtttctgtgtattccttcgttagatcgtgatcaagcttcccgagcttatgtatggtttcgcttctttttttgtcagctgaagaaagcttctgatctgtgctttcggttgaaaacagatcaagcgagatgatgtcttcgatctctctgaggatggaccccatgtcctttttttgcccttccataattgcctttgatttactgagggcgtgggtgagctcatgctccagaaatgattcctccacatgcgaattgaaaagtccggcgtcttcgaccttgccgggaaggcttgtgagaaatgcgattttcatgtcgatcagatcaagccagctgtctgtgacgccggcgtgatccttaaaaaaagctttgatgttgtcagcgccccggcctgaaaagtcgctgtcaccgaggtcagccataccttgaaacgctttttttagattgaccatctgaccgcgcagttttttatattcacccgcgcgctgtttggcggcggcgaggagggtggttgcttcgaaaactttcatgaccatatcctttcttttgttcgatatcaaaattttaccacgtgagtcaggatatacagtgtaggaaataggtaataagaataaaatgaatcttttggcttgcgacttccttcctgtatgaagggaggctttttatgttttgtataataaccctcacattcggcttactgcgctccggtgattttaagcgtgcctgttttttctaatgtcttacactcgaaacaacccaaccgctgaggtataatagaagcagagtatttatcatacagattcaattcgtgaaagagagtggaacaaaatgggccgtaagtggaacaatattaaagaaaagaaagcatcaaaggacgcaaatacgagccggatttacgcgaagttcggccgtgagatttatgtggcggcaaaacaaggcgagccagatccggaatcgaaccaggcgttaaaagtggtgcttgagcgtgcgaagacgtacagcgtgccgaaaaatattattgagcgtgcgattgaaaaggcgaaaggcggcgcggaggagaactttgacgagctgcgttacgaaggtttcgggccgaacggttcaatgatcatcgttgatgcgttaacgaataatgtaaaccgcacggcgcctgaagtgcgcgccgcattcgggaaaaacggcggaaatatgggtgtgagcgggtctgtcgcttacatgttcgatgcgactgccgttatcggcgttgaaggcaagacggcggatgaagcgctggaattgctgatggaagctgatgtggacgttcgcgatattttagaagaggatgacagtgtgatcgtgtatgccgagcctgaccaattccatgccgtgcaggaggcattcaaaaatgccggcgttgaagagttcaccgttgcggagctgacgatgcttgcgcaaaatgaagtcgagcttccggaagatgcgaaagctcaatttgaaaagctgatcgatgtgctggaagacctcgaagacgtacagcaggtttatcacaatgtagatttaggcgaataaagacaaaaaggccggggcggcataagttccggcctttttattttgcttaagcggtcggcctgtatcgtatttttctccgtaagcaattattgattatttcgccaaaactgggcggatgcccatacgtttccttccggatgtcataaactggactgtaacctatgtgaaggagcgataaatcatgaatgaaagaagaccgatttacggcggaggctttggcggcggctatggaggcttcggaggctacccggggtacggttttggcggctacggcggctacggaggatatccaggatacggtttcggcggaggctacggatacccgggatacggttttggcggttacggcggttttggcggctacggcggctacggaggcttcgggggatatccggggtacggttttggcggctatggcggaggctacggcggctacccgttccatcatcatcatcatcgggaaagccaatatatctgaccattcgggaaaaagcactcttggaacagcaagagtgtttttttgtgaccgtttctaagcgctggcttttcttattttcttacagggcataaatgccgatacggattcatacctattaaggtcatgtgtttaggaaaggaggatcgtaatgaaagaaaatcagccgtttacaccggtcaaatcctataaacccttccacagccggtttgatccctgcccgccgatcggaagaaaatacttcagaacgccgccgcatctttatatgcggtttcagccgtatcacttggagcagttttctccgatggaggcattgagaaaagggaccctttggaaggatctttacgatttctatgataatccttatcgggggggaatcgaatatggcgaaaaagattgatgatgaatattatcggctgctggagcaaattcaggcggcggactttgtcttggtggagctgacgctttatctggatacgcatccccatgaccgtctcgcgcttcagcagtttcatgaatattcccggtactcaagacagctgagaaagcggtttgagcctgagtacggaccgcttctgcaattcggcgtgagtcaggtcggcgctcaatgggactggggccgcggtccttggccatggcaagtataaggagggatctgtaaatgtgggtatatgaaaaaaagctgcagtatccggttaaagtcagtacatgcaacccgatgctggctaagtttctcattgaacaatacggcggggcggacggcgaattggccgcagcgctccggtacttaaaccagcgctacacgattcctgacaaggtgatcggcctgctgacggatatcggcacggaggagtttgcgcatttagaaatgattgcgacgatgatttataagctgacaaaagatgcgaccccggagcagctgcgtgatgcagggctcagtgatcattacgtcaaccatgacagcgcgctgttttatcacaatgcggccggagttccgttcacagcgtcttacatacaggcgaagggagatccgatcgctgatttatatgaggatattgcggctgaagaaaaggcgagagcgacgtatcaatggattattgatatttccgatgatcctgacctgaatgattcactccgttttctgcgtgagcgtgaaatcgtccactctatgcgtttcagggaagcggttgagattttaaaagaagaacgtgataagaagaaaattttttaaacggccctcaaacacgacggctgtttttttcctttctgcgtttggtctataataaaggtgtcgaatattctgattacaggaggattttatgacaccttttacgatcacggaggagaaggcgggggcattccgggtcacccccgcccggaaagatgatgcaaaagaggtcatggatctgctcgtgcaagcggcagaatggcttcgcgataaaggatcgaaccagtggagcggccttctgcaaggggaagatacccacaatatgcgggaggcgatcgcccaagggtgtgtttttttattcaggcagaatgaagagctggccggcgtcgtcatgctgcttcccgaagcaagcgggtgggacagacgtctttggggcgatgaaggacatgaggagtccgtatatctccaccggctggcgattgacaggcggtttgcaggggcggggctcggccggacaatcatgacttgggcggagacgggtgtgtcttgtccgggaaaaacgaaaatccggctcgattgcgtgtccgaaaacaaggcgcttcagtcgttttacagcggaatggggtacgaaccaaaaggatccgcgccgggttatcatttgtttgaaaaaaaggtgagtaaataaaaagcttctcatgacggaggtaaaagacatggggtttttttatctgatctgtctggccgcattttgtcttaactttgccgtatcggctgtgctccgcaagaaatggccgaaaaagatgtggcctgagtgccttttggcggtgctgggcctgactgctttcggtacggttgtttacagcattttcggtgtcggcggctgggaaggaatgggcttggggcttgccgcgatgtttgcgggttccggagcggccgccggttatgccgctgaggtgtgcttacgggtcgtcagatcgaatcgaaaacagtaagcagaagtgaaaaaacgcggcctcggctgcgttttttttgtgtgttgccggccgctgtatagaaaacaggcgaatgtccataatggtaatgacttttaagaagaaggtgcgaatatgggacatttacttacagtggcttgggagttagtatgcggtttgggtattttatttgtgattttaaaattgcttggaaaaactcaattctcgcaaattacgccgtttgattttatttccgcgctcatcctcggcgaactggtcggaaatgcggtgtatgataaaggcgtcaggatttttgaaatcatttttgcctctctgttatgggggattttaatttatctcatcgaactgattacgcagaaagtaaaaagctccagaaagctgttggaaggcgagccgagtattatcatacataaaggaaaactgaaatatgatgtgctgaaaaagaataagctggacattaatcaattgcaaagccttctcagacaggcgaattgcttttccatacaggaagcggagtacgcgattttagaaacaaacgggatggtcagcgtcctgccgaaatttcaatatgacacgacgaaaaacggcgacatgcaaataaagccgaagcaggtctctttgccggtcacgctgattattgacggcgaagtgctgtatgaaaatctgaaagaagccgggctggaagaaaagcagctgaatcaggagctgaaaaagctgaacatcaaaaaaacggaggacgtgttgtatgcggaatggaagcccgataaaccgctgtttgtcctgccgtatgaggagaaaaaataaaaagagcattgccctggggcaaatgctctttattatttttcgtgtacgcctgttttaacggctctgacatgatacataccgacatccgtcccaagcatataatcaggtttcggcttgccttggtttgctttgtgggccgcgatgtggtcttcgcttttttcccattgtttccaatggtcttcagactcccagcggattaacacgacgacttcttcatcaccgcggcggacttttttttccaggaccgttacgtctatcaaaccttcctgcttttcaatcacgccttctgaactgaagcgttcgattactttgtcggcatgtccttcttttacggtcatttttctgatttgcacaaacatctggcagctctccaatccttttcacgctttatccaacattttaaatgaaaatgattctcaaagtcaattaaggtgcatgacggattacgatttcaggagaaagacatgaccatcctcatctttaaattgcacgaagctgccccattccatttgtttcggttcatctaaaaaggtgatgccgttctttttcatctgttcgtatgcggcaaagacatcttcacactcaaatacgatagaagccttcatatgctcggcccctttcatcatcgatttcggataaataaccaaatgagtggcagctcctttgggcgcaacctcaagccagaaggcgcccgggcccatcggatgctcggcgacggtttcaaaccccgctttttccgtccagaatgttttcgctttttgctgatcatcagtgtatacggcgactgtcgcgatttttttgatcatcatactgacctcctgtttcatttcttttatagtgtatcctcctgccgaaaaaagcaatcaaaagctttaatgtgcaggctttttttaatttctctagtacgatcggcgattccgatttataatttagacaaaagtacatattcttgaaagaggagacggcagtgaacaaagaccaattacttcatgattatattattacacattcggcagagctgacggaaaaatggctcaagctgagacggaagctgagagggcgtttttattctgcggatcaattaagtgaggaaatgaaacggctgctgatcgagcagcatacctttacaaacacggtcatcgcaagcgcttttttggaagatccggccgtttttcagcataacaaagaaaaatgggccgcacaggtagcgaaaagcagagtggagcaagacgcggaggttcatgaggtcgttgaggcgatcggcaattcaagaaccgtcttttgggaggcggtcacccgttttatggatgagcatcaggacatcgtaacaaacgaggatgcccgccgctggaatcaccttgtcaacggctcgtttgatcagctgatgacggattttactgaacagtttcagaaattaatgatcgcgaggctgtcatctcagcaggagcttatttccgaattgagctgtccggttattttgatcgcggatacgatcggcactctgccgctcatcggatcgattgatacgagacgggcgcgcgtgattttggagtcggtgccggaaaactgtgtcgccaaacggatcacaaatcttgtgattgatctgtccggtgtgcccattgtcgatacgatggtggcgcagcaattgtatatgctgtcgaaaacgttatttctcctcggcatcagaaccgtgttttccggcattcggcctgatgtggcacagacttctatccaattggggcttgatttttcagagtatcaaacttacggctccctggagcaggcgctcgccagcatgggtgtcacatgtgtgatcgaggaagcaaaagcatagaaaaaaggtgctccggccagaggcggggcgcttttttttgtcagcggaaaacaatgtaaatatgtcggaacggaagattgcgttcttaaaaacagctatatgacgccttgggagtcgatttcgggatgacacggtttatatcaaagcgaaggaagtgaaagttttcgcaaagaaaacatatccaaaaattgtgtaaatgttattgatttctgaatgaaaacataatagtataattatatatttcttatcagaatagtatgaattaaaacactcattgtcaaaagacgaacggccagacataaagggggagcatgatgacgtccaaaggaaacgtagatccgcatgtgatcgaaaagattatcagcgcgctggaaacgctcgatttcgggacagttcagattacggttcataattcccaagtgacacaaattgataaggtggagaaatatcgattttccctgaagagcaaagaagtaaaacaatcttaaaaaacagccaatgacaggaggcggtacatatgaagcattcaactgttcctttccgggagagccggtatctacacctgcccgaagtgcgctttctgcattggtgcacgaagcaatacggcattaacaaaggcgtgctcaatacaattgacggctggttttatgatgcgggcgtcattccgattcccgtcaggcgtctttatgtgctggcattcctcgattttgcgaaaacgccggggcagaaggggaatatccgattcgggcacggcggattgacgaaaaaactgcatgatttcatggataggcaggagtgcgcagcaaaacgtcaggcctgacatccttaaaatcttcttaaaatcatgcgaatttctcccattttatttataatagacctatcaagatcatttttttgggaggacttttgacatgcaaactgctgcttatgagagcaaacaatctattatgcagcgcattataacggtatttgtgtttacacttttagttgcgacaatcggcctgtatacgggccagttcattccgccggcattgatgctgccgctgtcggtcttagaggtcgtcatgatcatcgccgcattttggctgcgccgaaaaaaagccgtcggatatgtgtttgtcttttcattcgctttcatttccggaatgacgctgtttccgattatcagccattatgcgtccgcagcgggggcctatgtcgtattggaggcattcggttcatcgtttgtgatttttgcggtgctcggcacgatcggcgttaagacgaaaaaggacttgtcgtttttatggtccttcttgcttgtcgctgtcatcgcgcttctcgcagtggggatctttaatattttcagcccgctgaattccgccgccatgatggcgtattccgtcatcgggacgattgtgttttcaatgtacatcttatacgatctgaaccagatcaagcaccgggacatcacggctgacctgattcctttgatggcattgacgctttatatcgactttattaacctgtttatcaacctgctacggtttttcggaattttaaacagtgatgattaaccgcgcgaaaaaggcgccctgttgagaggggcgcctttttatgttctgccgccggaaaacagcagaagcttatcaaataatacttcaagcatttttgtcaattccgctttttgttcagcggtgaagctttccatgactcctgaaatattggagaagtggccgggaagaaacagcatcagcttttcttttccttcttttgtgagttcgatgctgatttttcgtctgtcgccggtatgccggctgcggtttacaaagccgtcccgtgcgagtccgtcgatcaatccggtgatggtcgctttggtgacattggaatttttcgccagctccgtcggactcaggctgtgtccgggtgcgtcaaacagaaacatcaaaattttgaatttcccttcggacaatccgtgacttgagaaataatgctccatgacctgattcatttttttagacatatcaaataacgtcaaaaatgttttcaatgattcagcatccatatcggcgtaaatctcagcgtgtccggcaatctgcgagtaatccggcaaatgtctcaactccattttgtaagcctccgtaccattttagtgattcaaagtataagcttgccggattcaaaaggcaacctataaagattgacagtttttcagcttatatagtaaggtggctaatagttaatgaatgataaataaatagagaaggcggtatcgtgatgaaccatgaagtgaaaaagatcatcatagcgggcggagggatcggcggcctgtccgcagcgatttctctcggcagagcgggttttgaagtgaccctttgcgaggcggcgtccgacatgcgaaaaagcggagcgggcattctccagccccaaaatgcgctgcgggtgctgcgggaaatcggtgtgtatgatgaatgctgtcaacacggctttcaaacggaatggctgaagcagcatgatgaaaacggaacgctgcagtttaaagtgagtgaggcgtttttagatgattcattgccggggcggaataatatattgcggcaaacgttaaacgatatcctcaaaaaacatgctgaagcggcgggggtcacgattctgcccggtaaaaaagtcgtgtcttacgaagaaacagcagatgaaataacggtgcattgtgcagacggaaccgcgatgacggctgacatcctcgccggctttgacggcattcgctccgctgtccgcgatcaaatgctgcaaagagaagtgaaaacagagtatctcggcatgggagcgcacagattttacatttcttttcccgagccgatatttcatgattcgacactgatgtataaaaaagggcagacgcaggtcggagtcgtgccgctctctgaaaaaacaggatacgtatttatcatccggccgtatgacgctgacttcagggatgacgaggacacgcgttttgaacgggtgaaagacttgctgcgcggaattccgggagtaaagtttgtgacagagaatatgtcaaaggaatatcccgttttgtttcataagattgagcagatggcggtcaaagaaccgtggcacagaggccgcgtcgttctgggcggggatgccgtccatgcaggagcgccgacattggcccagggagcggcgatggcgattgaagacgcgattgtgcttagtgaagaactgcaaaaacacgaaaaccatgaaactgcatgtcaagcatacttcgaaagacgggcggagcgggcattacaggtgcagaatctctcatctgaaatcgtccgccgcgagataaagggaacgcccggcgtccaggacatcatgagggaatgctatcgattgctcaaagagccttattaaataaagaaagtccagaacatggcgtctggacttttgtcagtcttgttcagatttattccgtatccgttcaattacctcatgcagcccctcaggcttgtgaaactccaccggcgaactgcctttttcaaacgagatcgtctccgcctcaatgagcgcgacatagcgcccgttcacttttgcgagatggatggattcgccgaaatcagccagtaatcctttaatctctgtttctccgactttcattttcagctcggcttccggcgtgtgttcaatgatctgcgcggatgcctcgatgacttgatgagtgtcgaggcgctcctgaatttcccgcttttcactcgcttcccaaatttcaatgtcgtgctcaaactgctgaagctcttcgctgttttcttcaaacgtttcatacacgtgttcctgcaccatgttcatgacttggcttttcatgatttccggcatcgattcgccgtattcgacaaatttgagaaaatcttcgaaataacgggcgtgcgaggcctggtggattttcagctcatgctcttccgtcatgccttcttccggcatatacggatattgaatgcttttcatgttttttgtcgtgatggccatttcgacctttttaatgagagacgaggcgtctgagatgcgggcgaccttcggctcgaaatcgcatttcatcataaagacgaatttgtcttcaaaatacttgcgcggaacggccgatgccacgataaaaacaccgccgcgcacagcgctcgtgtcaaggtaagtgcggacgaactgctcgcttgcttcgataaatgcttccttcgtatccgcaagtctggcgcggttgaaaaggttgtaattcggatttgaatcaagctcatggcccggctccgtgataaaatggccgatttttgttgggacttgctcggattgcggatgccgttcggctttccgtttgacgattttcttcaattccccgtcaagaaaatccttcagctcgctttcttcaaattcttccgtgtcaagggtctggaaatgtttgaactgtttgtttgcctgttcatcttttccttccacttgaatgacataaaacgataaaaacttgatttcaaaatccatatgtgaactcaccttatttctgtatttgacaagcctctccagtatagaaaaaaccgttatcgatcgtcaatccgatgattgatccgtgacggcggataatcggccggtgaaaagggcaatgtagttggaaggaacgcatcaatgtgttagaaagggtgttattcatgaaggaaacaggtccgattccgcagccgaagacattcggcccgctcggcaatcttcctttgcttgataaagacaagcctacaatgtcgctgatcaaactggcaaacgagcaggggcctatttttcagctgcataccccggcgggcgccattatcgtcgtgtccggccatgaactggtgaaagaggtttgtgatgaagaacggttcgataaaagcattgaaggagctttggagaaagtccgggcgttttccggtgacgggctgtttacaagctggacgcatgagcctaactggcgaaaggcgcataatattctgatgccgaccttcagccagcgcgcgatgaaagattatcattcgatgatgactgatatcgcggtgcagctgattcaaaaatgggctaggctcaacccggatgaggccgttgatgtgcctgctgatatgacccgcctgacgctcgatacgatcgggctttgcggctttaactatcggtttaacagctattacagggaaacgcctcatccgtttatcaacagcatggtgcgcgcccttgatgaagcgatgcaccaaatgcagcgccttgatgttcaggataagcttatgatcaggacgaagcgccaatttcatcatgacattcaggcgatgttttcgttagtagacagtattatcgcagagcgccggtcaggcggccgggatgaaaaggatctgctggccagaatgctgaatgtggaagacccggaaacgggcgaaaaacttgatgatgaaaatatccggtttcaaatcatcacgtttttaattgccggccatgaaacgacaagcggcctgctttcctttgccatctactttctgctgaaacatccccgtgttttggaaaaagcctatgaagaagccgatcgggttttgaccgatcccgttccttcatataaacaagtgctggatctgacttatatccgaatgattttgcaggagtcattgcgtttatggccgaccgcgcctgcgttcagcctttatgcgaaagaggatacggtgatcggcgggaaatatccgatcacgccgaaagacagaatttccgtcttaattccccagcttcaccgtgataaagacgcgtggggagacaatgcggaggaattttatccggagcggtttgaacatcctgatcaagtgcctcaccatgcgtataagccgttcggaaacggtcagagggcgtgtatcggtatgcagttcgccctgcatgaagcaactcttgttctggggatgattctgcagcattttacctttatcgatcacaccgattatgagctcgatattaaacagacactgacgatcaagcccggcgactttcatatccgggtgcggccgagaaacaaaggagccgttgcggcagctctcccggcggctgaaaaaacggcgggagacgtcgaaaaagaaaaacgggaaacaaaaggcgcatccattatcgggcttgataaccgaccgcttctgattctgtacggctcagatacgggaaccgcagaaggcgtggcgcgggagcttgccgatactgccgggatgcacggcgtccggactgaaacggcgcctttgaatgaccggatcggaaaactgccgaaagaaggagctctcttgatcattacgtcctcttataacggaaagcctccgagcaacgcgggacaattcgttcaatggcttgaagaagtcaaacccggggaattggaaggcgtccgatatgccgtcttcggctgcggtgatcataactgggcggcgacatatcaggctgtgccgagactgattgatgagaagcttgccgaaaaaggggcggaacgcttttcctcccgaggtgaaggggacgtcagcggcgattttgaaggaaagcttgatgaatggaaaaaaagcatgtggacggacgccatgaaggcattcggtctcaagctgaatgaaaatgccgaaaaagagcggagtgcgctgggccttcaatttgtcagcgggcttggcgggtctcctttggcacagacgtatgaagcggtttacgcatccgttgcggaaaacagggaacttcaggcgccggaaagcggccggagcacaaggcatatcgaaatcactctgccgaaagaggctgcctatcatgaaggggatcatctcggcgtgctgccggtaaacagcaaagagcaggtcagccgtgttctccgccggttcaatctgaacgggaatgatcaagtgctgctgacagccagcggacagagcgcggctcatctcccgctcgatcggccggtcaggctgcatgatcttctgagcagctgtgtcgaattgcaggaagcggcatcaagggctcaaatccgggaaatggccgcttatacggtctgcccgccgcacaaacgggaattggaagattttcttgaggagggcgtctatcaggagcaaatcttaacatcgcgcgtctcgatgctcgatctccttgaaaaatatgaagcgtgtgaacttccgtttgagcgatttctggagcttttgcgcccgttgaagccgcggtattattcgatttcaagttcgccccggaaacatcccgggcaggcttcaattaccgtcggcgtcgttcgcggccccgcccggagcggtttgggtgagtatcgcggagtcgcttcgaattatttagcggaccgcggccctgaggatggtatcgtgatgtttgtccgcactccggaaacacgattccggctgccggaagatccggaaaaaccgattattatggtcggtcccggcacaggagtcgccccgttccgcgggtttctgcaggcccgggcggcgttaaaaaaagaaggaaaagagctgggggaggctcatctgtatttcggatgcagaaacgatcatgattttatttaccgtgacgagcttgaagcttatgaaaaagacggaatcgtgacgcttcatacggctttctcccgcaaagaaggcgtaccgaaaacgtatgtgcagcacttaatggcgaaagacgccggcgctttaatttccatcctcggccggggagggcacctctacgtatgcggcgacggcagcaaaatggcgcccgatgtagaggcaacgctgcaaaaagcgtatcagtcggtccacgaaacagacgaacggcaagcgcaagaatggcttttggacctccagacaaaaggcatttacgcaaaagatgtttgggcggggatttgaccgatttgatgtaaaggactggatgactccagtcctttttccttcaagaaaatgaattgctttccaatcgatatacattcggtttgtcagcaatctgaaggctttgttgggagatcttataacaagataaggatggctcacagtggtggaacgatatcagcgccaagagtcccatctgctgtttccaagactaaatagttgcgcctattttggataaaacctctttacaaatatatggaattagaatatactctgtttcacaaagtactttgtaaaaagaggagcctgttttatgtcaaatcagaattttcgtgaatcagagatagctgaaaacttatctcatatcaaagtcttaacgaactacaagactgagtactcaaggcaaaccagtccatatttcattatttggggctgtatatggattattgcgtactccgtttctttatgtaaggtaccttctgtagtccttgcttgtgtctggttaatactggcagtattagggtggatactgactttgaagacatatcttaagcagaaacaatttgatcccatgcccactttcttaaagaatcaattaaaatatgcatggattggattcatattaatggtatgcatttttgttttcctgattttaatgggattattgccgcgaacaggagaatttctatcgtttttgattgtgttaatggtgtctattatgtacatattcttaggcatcgtgttaacaaaagagatttttgttatgggattttggctgagcatactcggtatgcttacattctgcttacttcctaatgcaatgaatattgtttttgcatttattggcggaggcagcctattacttacaggaatgattttgaaaagaaaagggcaaggaaatgagtaatgttaacaatatcaatgatttaatacatgccaaagtacggttgggaattatgagtttactgatgacttatgatcaatgtgattttactttcctgaaaaagtcattagacatcacagatgggaatttaggttcgcatctgaaaaagttagaagatgcagcttatatagaactaaccaagaagttcgtatccaaaaagccgaagactattgttcagattacgaaagaagggaaagcagcctacaaggagtacattaatacaattgaatccatatttaaaataaataacagtgggggaatggtgtaaatgctgcaagttgaacatataagtaagcgctatggcacgactctggctttggacaatgtggctttaacaattccgaaaggagtctgctatggacttgttggaccgaacggatccggcaaatctaccttaattaagatcatctcacgcatcatccgggaatatgacggtaaggttgaatttgtcggtaatgaaaatggcagattgggttatgttccacaggatatcagccttgaagaaaaattaaccgcaaagaccaatatggaatttttcggaaaggtacatggactgaatggcttaaaactaaagcaaacaacaaaaaaactgttagaagatatcgggttgtcagaaaggacaaacgacgttgtggagaacttttccggaggaatgaagcgccgtttaaatatcgggtgtgcattaatgcacgatccagacttaattattctagatgagccgacggtaggcgtggatccgcaatcacgccgctacatttttaacatcgtaaatcgactcaaaaaagccggtaaaaccattatttatgtgagccattacatggaagagattgaaactctttgtgactatgtagcttttatcgacagagggcagattatcgatgaaggagaaataaatgaactgcttaaacgacatgaagaatcatctattatgtttaactcctcattgtctcatgaattaataaagagccatggttttgagttttcagtcgttaattcagggctgataataaaaaccaaaaaacctttagaaaccatggagcgcttaattagcgtcagtaaggaaaacaatattgtgcctcatcagttgtttttatataagccaaaattagaagatgtattctttaaacttaccggcactgatttgcgtgatgaagaataaagggggaatttatcatgttaccgctcgctcaaattgaaacgctaaaacagttaaaggataagtctctgtttttttggacgattatattacctattgtgtccatcatattgctgattgagctatttacgacagacagtacaaacaaaactttagtagcttcacaatccgtaaccggtatgagcgtattcttttctacattcattattatctccatcgttataagttttgtaaaggatcgggaaaaaggaattgtatcaagactggcaagtacccctttaaagccttataacttcttcttaggaaaaagtatcccttttttagtcataacttttatgcaaatgcttctcctttctgttttaggaatatttctgtatgatattgaaattaataattttccggcgtatctgtgggttgttgtgttgatatctttactggttacatcctggggagttgccatttcagtctttgcaaagactgaaaataccggtttggtcatgacaaatgtgattgcattaggtaccgctgttgtatgtggtttatggaccccttatgatcaattaccaagctatcttcaaactattggaatgctctttccgcagtactgggcgcatcaagggttaattcaatcggtctcgacgatatcgggaggagaaagtctaatatgggtaacccttgttgtactgagctatacaatactgggatttatagtttctctaattggataccggcattacattaaaatggcaagaaactagaccgctgaagaatgggtcattaaaacgcagctgggactaaaaggagagcgggaaatgataagtgaaaaactaaaactgtatgtcgagggtctatttaaaaagtacgaaagaaattcgttactgagtagaaaaaaacggagctaattcctttattggcgggtttgatgaaaccaattcacaatttttttcgctaatgagaaacagaaatttgcaagacgcgttaaggaccagtgttggagaacagttaaagcagtcacaaatgccagctctgctgcatggttggattataaaaaacaaaaggtaaacgtgaagaaagcatttttgtatatctttagggtctaagcgataatttgacaggtaaaggactggatgactccagtcctttttttacatcagccaaaaaaaccttcaagttttttaacccctttgcatacaataacttcagcccgcctgttgggcggctgtctttgatattcatttttcgtttttagaagtttgtgttattcttatatttggtatctcctattttcagaccgggtctgatacggtaccttttaatgccagaaaaaaatgtgaaacgaagaacggatatcctgcgtctaatggctggcgggataagatgttcaatgggcatgacacgaatgataaatatatcgtttttttaaatggtgtgtttatggggctgtgtgatgctttcgttttgctcggaaagcaggaattgaagcaaaaagtaagaatacagatttaaagtgtttaggaaagtagaggttgccatgaagaaattattttcttacagacttagtttttttgtactggctattattttgttttgggccaaaacgtatttagcctatcatgctgaattcaaccttggggtgaagggtccgacgcagcagtttctgcttgtgatcaatccgttctcaagcgccattttctttttaggactggcattgtttgcgaaaggccgcaaatcagcgattatcatggtgattattgatttcatcatgacgtttattttgtatgcaaatatcctattctatcgattcttcgatgatttcttgacattcccgaacttaaagcaatccggtaatgtgggaaatatgggagacggcatcttcagcattatgtccggccatgatattttatactttgttgatattattattttaatcgcgcttctggtgtggagacgtgagctgaaggaattcaagctgaaaaaacggtatacgtcattaattatcgtgacgggtattgttttgttcttcgtgaacctggcgattgccgaagaggaccgcccggagctgctgacaagaacgtttgaccgcaattacattgtaaaatacttaggcctttataattacacaatttatgacggcgtacagacggcgcagacggaatcacagcgggcatatgccagcagcgatgacctgacgagcgttgaaaactacacatcgtcgcattatgcgaagccgaacgccgagtatttcggcaaggccaaaggcaaaaacatcattaagattcacctggagagcttccaatcgtttttgatcaactacaaacttgacggaaaagaagtcacgccgttcctgaataaactcgcccgcggcggagaggacatgacgtactttgataactttttccaccaaacgggccaaggtaaaacatctgacgccgagctgatgatggataacagcctgttcggactgcctgaaggatcagccttcgtgacaaaaggggaaaacacgtatcaatcgcttcctgccatccttgaccaaagtgagggctatacaagcgccgttttacacggtgactacaaatcattctggaaccgtgaccagatttacaaacatatcggctacgataaattctttgacgccagcacatacgatatgtctgatgacaaccttgtcaatatgggactgaaggataaaccattcttcaaagaatccattccgaagcttcaatcgctgaaacagccgttctacgcgcatttgctcacgctgacgaaccattatccgtttacgcttgatgaaaaagacgcaacgatcgaaaaagcgaaaacgggcgacgcgactgtggatgactatttccagacggcgcgttatctcgacgaggcgcttgaacagttctttaaagacctgaagtcatccggtttatatgacaactcggtgattatgctttacggagaccattacggaatctctgaaaaccataaccgcgcgatgaaagaaattctcggcaaagaaattacgccttatcaaaacgcgcagaatcagcgtgtgccgcttatgcttcgcatccccggcaaaaaaggcggggtgaaccatacgtacggcggtgaaatggacgttgtgccgacgatccttcacttggaaggcatcgattctaagaaatatattaatttcggcaccgatctcttctcgaaagaccatgatgatacggtgacgttccgtaacggagattacgtcacgccgaaatatacttccatctccaatgtcgtatacgatacgaagacaggaaaagaactgaaaggcaatcaggaaacgaaaaacctgaaagccagagtcacagagcagctgaagctgtctgacagcgtgatgtacaaagacttgctcagattccacaaattgagcgactttacgccggttgatccgtctaaatatcattacggcaaagaaaagctgaatcaggataataaataatagaaagagccttacggaatttccgtgaggctctttttttgtgtgtatcttcaccaatctgaaaaaagagagagcttttggtcacaaagggcgccaatctctcatatcttacagtagattttgaaaccggtgatagagaatcggacaaattatcgggttggtttctcttatacgggcggtttcgaatccaatattcacagagaagaggggtagagatgaaagcagtcattctctgcggcggaaaaggaacgagaatgagcgaaatcaccaatgaacgtcccaaaccgctcgccatgataggcggcaaaccgattctatggcatattatgaaactctatcaatactatggcgtgaacgaatttatcctgcttcttggtttcaaaggagagatgattaaggaatatttcttagattatgactggaagaatcacagcatgacgctggacagctctaccggagaagtgcggatattgggaaaatccgagccgtggaaaatcacttttttagacacgggggaacacacgcagacagcggggcggcttttacaggcgaaggacatcatcggtgatgaaacctttcttatgacgtacggggacggactggcgaacatcaacctgtttcatctgatcagctatcatcaatcaaaaggggctgcggcgaccgtcaccggtatagaaaagacctcgcaattcggaacgctgacggttgaagacggtatggcgaaaagcttttctgaaaaaacctcaagtgacggcatcatcaacggcggatttttcgtgctcagcccgaaggtatttgattatctgccgaaagacagggatgtcatgtttgaagaagaaccgctgaaggagctggcgaaagacggcgaattggcggtataccggcattacggtttctggacggcgatcgatacgtataaaaacctgctggaaatcaacaagatgtgggaccggggacaacatgtatggaaggtatggtgatcaagtttgagtttctggaaaaataaaaatgtgtttgtgacgggatgtacaggtcttttaggaagctgcttggtgaaggaactgatcgatcagggggccaatgtgacgggacttgtccgtgacactgtgcccaagtcgaacctgtatcagggagaacaagtgaagcaaatgaatatcgtgcagggcgcgcttgaagatctggatgtgattgagcgggcgctgggcgaatatgaaattgacacggtctttcatttagccgctcaggcgatcgtcggcgtcgcaaaccgcaatccgatttccacatttgaagccaatattctcggcacatggaacatccttgaagcgtgccgcaggcatccgctcatcaagcgggtgatcgtcgcgtccagtgataaagcgtacggcgaccagccgacactgccgtacgatgaaaacatgcctcttcaaggcaaacatccttatgacgtatcaaaaagctgtgccgatttattaagccacacatattttaatacgtacggacttccggtctgtattacgcgctgcggcaacttgtacggcggcggagatttgaacttcaaccggattattccgcagacgattcagctcgtgctgaacggtgaagcgccggaaatccgcagcgacggcacatttatccgtgattatttttacatcgaggatgcggtcgaggcataccttttgctggcggaaaagatggaggagctcaatcttgcgggagaagcgttcaacttcagcaatgagattcagctgacggtgctggagcttgtagaaaaaattcttaaggccatggacagtgacctcaagccgaaagtgctcaaccagggaagccatgaaatcaagcaccaatatttatcggcggaaaaggcgaggaagcttctgaattggacacccgcgcataccattgatgaaggattggaaaaaacgatcgaatggtataaagccttttttcaaaagtaacagaaacagaggtgagagaaagacgtgacaagcgcatattgcacagttttatcaaaaggaaggctgtatcaggctatcgctttgttcggctcattgaaagcggttcaggcggacgcccccatttttactttgtgtatggatcaagacacctatgacgtgcttcaggcaatgcggcaggataatgtcaccttgattcaggtgtccgcactggaaaatgaggagctccttgaactgaagcggacgagggatcagagcgaatactgctggacggtgaagccggtatttctcgaattcgtgctggacggacatccggaattagagcgtgtcacgtacattgatgccgatttgtttttcttcgctgatccgcgcgcgatttttgacaatcagccggattgttcggtgcttctgtcacggggcgatatcgtcattccctcatttgaaaaacaggaaatcgacatgctgcagcgtcttttaggccggtataattccggttttctcagcttcaaaaccgacagtgccggcacagattgtctcagatggtggaaagaacgctgcctggaagaatgcaaaaatgcgccgggcgaaggaaaattcggagatcaaggctacttggattacatgtccggcctgttcccgaatgtgtgtgacatcaccacgcccggcgtgaatatcggccattggaattacggccgccacacgttttcatggaaggacgggcgtcttgtgctcgaagacggaagtccgctgattttctatcatttcagcggataccggatcgttacagccggcgacattcggcagattcatgagacggaccggaccgacctgccgtttgtccatcagctttatcaggacattctgaagcgggtgatcgggacggtcagcgccgtctgcccggagttcagcggctttgcatctgaggatgataacaaataaatgatcatatacaggaagtgaacgaaaagtgaaggcaagcgtcattgttcccgcatataattccaaggagcggctctataacagcctgctgtccctgaatgaacaggaatgcacagagccgttcgaagtgattgtggctgacaacggttcggaagacggaaccttatccatgcttgaatcattcagcgcgaattttccgctgatttttgtgagaattaaagaaaacagagggatcgcttacggccggaatcaggcggtccgcaatgccagaggcgatattttgatcttccatgacagcgatatgcttgccgaaaaggatttggtggcgaagcatatcaaggctcatgagaaccgggacgatcttgtcgtatgcggtatgttctggaagcggatttacagcttttattatgaccgttttgaaaaagagcataaagagaaactcgccgaactgtatgaagagctgccgggcgataaagagccgctccttcatgaaagtgatatcagagacggaagttttcttgaccaatgctttgatttagataccgactttatccgtgtgctgaaaagcattttggaaaaatacggagatgatttgaacggctaccgtctgccgtggcgttttttcattacgaacaattcgtcagtcaagcgacagcacgtggcagatctcggcctgtttgatgaaggcattgtcagatacggctttgaagattatgatctcggcatcaggcttcatcagtcgggaatgagatttcagctgcggcgcgatatcatgagcgtccatcaggagcatccgagcaactgcgcttccgttgatgacatcagggcgaatatcgcgtacatgtgcgacaagtataatgacattcattcgcttgacgtgcacctcgcgtttaacggcccgtttgacgcggagttaaccaacagcatgatggcagacatcgaagtgctgcttaattatgagaaatatgaaagcctgctgcacatttttctcgagctgctgcacgcggttaaagaccgcaaccttgacccggactggaagacgaaaagcccgcggatcacggcgaacagcttcaatctgccggaggtcggaaagcttttggcaaaagcggaaaaaaagctgggcgtcacgcactttgcaagggcgttcaaagcgctggctgctgatttactgcatgtggatcttaaataaattggatgtgatatggtgagtaaatatcatttttcaaccattgtttccagaacgcatatctttaaactgatgccgatgattcattctctccatgagcattgccgggattttcatctgtatgtgctgtgtgtcgatccgaaagcgtacgaactgcttcagcaggtgccgtgggaacatatcacggcggttcagctccatgaaatggaggacccggagctgcttgaagcaaagggcggccggacgtttcatgagtattgctggacgctgaaaccggcatttctgttccatgtgatgacggagtatgatgaagctgaatattttgcccacttggacaccgatctctttttcttctcagatgcgggcgagctgtttgcggaaaagccggatgcttccctttttctgacggaccaccgcaattcagaacggtttgcgtcttattacaagctgacagggcagtacaacaccgggtttgtcggcgcgcggaataccggggaagcgtatcgggcggtctggcagtggaggcaggattgcatctcttattgtacggtggagatgaatgaagaaaaaaagacatacggtgatcaaaggtatgttgaaaagtggcccgcgcagtttgaagacgttcatgtcacggagtcgatcggcgcgaatgcggcgctgtggaatattgagcaatatgacgtcagcctgcgcggcggggctgtatatgtcaatgacaccccgctgattttttatcatttttcaggctttacgctcgtcacggagaacgaattcaatctgtgctggtactatcacattgatgacgaggcgacagtcaatatgatttacgtgccgtacatcaaaaacgtaaaaaaatggattgatgaaattcaaaaagcgtttcctgatttcagagacgggtttattccgaaatatgcggttcctgatactcatttttatacggttgaaacataaaatccctgccgaaaaggcagggattatttttatgaatgccattcttttaatgttttgtcgctcggcaggacaaaggcgagcagacctaaaacgggcagaaaggcgacggcagtcatggtcggcgtcaatcccgctgaatcaataagagctccgagcgcaacggctccgatcgcgcccattccgaaggcgagcccgaccgtaagccctgacatcgttccgattttgcctggaacaagctcctgcgcgtagacaaccgtcacggagaagctggacatcagaacaacaccgatcagcgccagtacgccataggcgatgacaggccccgcaaacggaaggaaaatcgtcaatggagccgatgctatcatcgaaacaatgatgacgttccgctttccgaaacggtctgcaagcggcccgccgagaaacgttccgacagctccgaaaaataaaaagacgaagatgtagctctgtgcctgctgaatgctgacatgataggcattcatcgcatagaacgtataaaagttgccgatcgcgctcacataccaggagcgcgcgaaaattaagaagataatcatgataagggcgagaataatcggttttgtaatcacggtctgcacagcggaggccggtgattttttacttacggcgcgcaaatgaataaggcggcctttataccatttggcgatatagatgagaaacagcacagcgattgcggcgactagcgtaaaccagacagagccgaattgaccaagcggaacgagaatcagcgcggtaatcaagggcgccatcgcctggccggtattccctccgacttggtaaatcgattgcgccaacccgcgcttttcgccggcggccatgtaggcgacacgcgatccttcaggatgaaagacggcggagccaaggccgataaaaaagacacagcataaaatcgtcagaaaagacggggcgaacgcgagacctaaaatgccgagcatgcttgcggtgagtccgagcggcaaagcatacggcatcgggcgtttatccgtataccagccgatgacgggctgcatcacggaagacaccatattcagcgtaaaggcgataattccgagctgcgtaaatgtaagattcatggaacgttccaatatcggaaacatcgccggaatcaccgcttgcagtgaatcgttcagcaaatgacagatcccgataatgaacaaaatagaatacatggttgtctcgggacgatggacaggtttttctttaagcggggcggcaattgccaaagtgattctcctcctttttatgtaaacgaagcatacaccatattattcataaggtgaatgaattatcaagtgcaaaaaaggctcttctttctcaaacagaaaaaagagccttccttttttatttatttaacaaactgtgttttctcgaatacatcatataaacgacgatcccggcggcgatccagatgacaaaggcgagccatgtcacacccggcaggctgcttgcgagatacaggcataagcatgcgctgatgatcggcacaaaaggcacgaaaggaacacggaaggaagatttgatctccggatgtttctttcttaaaacgatgacggcgatcgcaatgaccgtaaaggccgccaaggttcccatgttgacgagatgcgccaaggttcccaaatcaataaaacccgcgatcccggcggcaacgatccccgtcacccatgtgttttgaaacggtgttttaaaacgcgggtgaaccttggaaaacatgcggggcaaaaggccgtctctgctcatcgcaaatgtaaggcgcacctgagcgtaaagcagagcgagcatgaccgttgtaatcccgataatcgcgccgacggaaataatgcctgctatcttgttctggccgacaaattggagcgcgaaagataccggatctccgacattcagcttagtatacgaaagcattcccgtcaggacgagcgataccgtaatgtaaaggatggtgcagatggcaagcgcaccgatgattccgaacggcattgatttctgcgggtttttcacttcttccgacgcgtttgacacggcatcaaatccgagatacgcgaagaaaacggtcgcggcgctcgtgatgacgcctttcattccgaacggcataaacggcgaccagttttccggtttcacgtagccgaaaccgacgatgataaacagcagaatgatcgcaattttcatcaatacaatgacattgttaaagcgggtgctttctttcacgccccttgaaacaatcgcggtaatgaccaaaataatgataacggccggcaggttgaacacggcacccgttttgctgccgggtgcggcggtcagcgcctccggaagatgcagcccgaagcccgcaagaagcgactggaaataggaagaccagccggttgcgacggcggcgagcgcgatgacatattcaagcattaagtcccatccgattaaaaacgcgagacactccccgagagtgacatatgaatacgtatatacgctgcctgaaatcggaatggatgaagaaaattccgcataacaaaacgcggcgagcgcgcaggcaaggcccgcgagcacaaacgacagaatcaaagccggtcctgcgcctgtcgcggccacagtcccggtaatcacaaaaatccccgtgccgacaacacagccgattccgagcaaaaccaagtcaaaagcgcttaacgagcgggacaggctggtctgtttgctctgagcctttaagtcggccagcggctttttccgaaatagtaaagacatatgggtcctcctgaaaattcataatattcttatcattatatacactgacgtttgtattatattgtcgaaatttctcgcagtcaattaaagaattttccactttaaaaggacaaagctaaaaagcgtcgatgcacggaaggaacgggaattttattgtgaaatagttcaattttctcaccttaagaccgatacaaaagatgactcatcaactaatttcaagtttcggtgaaagggagatgttttacatgtttcaatatgaagaactaaataagcagtttatcggcggccgatggagggatggaagcagccggaacgtattggaaaacagaaatccttatactcaaaaagtcatcacctcattccaaaaagcgacgtctgatgacgtggatgcggcatatcgcgccgcggctcttgcgaaacaagaatgggacaaagtaaacccttttaaaaagcgggccattttggaaaaagccgtttctttcattgaagagcacgaagaagcgattatttacttaatcatggaggagcttggcggaacacggctgaaggctgagtttgaaatcggacttgtcaaaaatatgataaaagaagccgcaacatttccggtgcggatggaagggaaaattctcccgtccacgattgacggaaaagaaaacaggctgtacagaatacccgccggagtcgtgggggtgatcagcccgtttaatttcccgtttttcctttcgatgaaatctgttgcgccggcactgggcgcggggaacggcgtcgtgctgaagcctcatgaagaaacaccgatctgcggcggaacgcttatcgcgaaaatttttgaagcggccggcgtaccggacgggctgctgaatgttatcgtgacggatatcggggagatcggcgacagctttgttgagcatcccgtgccgcggataatctcatttacaggctcaaccggagtgggcagctatatcggacagcttgcggtcaaacactttaaaaaaccgctgttggagcttggcggaaacagcgcgctgatcgtgcttgaggatgctgatcttgaatacgccgtcaatgcggctgtattcagccggtttacgcatcaaggccagatctgtatgtcggcgaaccgcgtgctcgttcacacatctgtatatgacaaatttacagagctttacgaagcgaaagtgtcatcgctgaaagtcggcgatccgatggaccctgatacggttatcggccctttaatcaatgagagacaggcggaaggtttgagacggtctgtcgaaaaagcgatagaagagggagcggttccggtgctgtccggccgattcagcggaacggtcgctgagcccgtcattttaaaagatgtgaaacctgagatgagcattgcgaaggaggagctgttcggaccggccgtctgcatcatgccgtttgaaacggaggaggaagcggtaagcatcgcaaacgcgacaccgttcggtttaagcggagccgtgcatacggcaaacgttgagcgcggcgttgagtttgctaagcggatcgaaaccggcatgattcacgtcaacgatacgaccattaatgatgaaccgaacgtcgcgttcggcggcgagaaacaatcaggtctcggcaggctgaacggcgaatggagccttgaagaattcaccacgctgaaatggatttcggttcagcatgaaaaacggcaattcccatattaagaaggagtgaaagaaatgagtatacagacggagcagcaaacgcacagcctgcttgacgcttttgtcaaagttgcgccttttttaaacagcctgatccaagatgacatcaccatcggaatttatgatacagaaaaattaatcgtgaatattccggctaaaacgttttctcttaatgtaaagccgggagacccgctgcaaaaaggggacatcattacagacgcgatccgcatgaatcagaagaagacaagcatggtgccgaaagagctgttcggatttccgctgatcgccagagcgattccgcttcacgatgaaaacggaaaagtcatcggcggcgtcggtctcggcaccagccttgaaaaatcagccaagcttcacgatgtcgctgaaagcctgtccgccgtcgtggaacagaccgcttcggccatcgcggatatctcagaatccatcagcggtttctcagcacagatgaccgggatttccactcaggcgaaacaagtcagtgaaagcgcgggagaaatcgccgacatttccgtcactgtcaagggcatctcggatcaaagcaatctgctcggtttgaatgcggccattgaagccgcgagagcaggagaatccggcaagggcttttccgtggtggcggatgagatccgcaagcttgccactcattcaaaagacaacgtcggccaaattgaccagattacgaaaaaaatccacagcctgctgaaagggctggaggactctattgaatccatcaaccagaacacaaacggccaagcggcggcggttgaacaaatttctgccacgatgcaggaaatttcgggaagcgcccagcatttagcgaaaatggctgaaaacgtactcggagagtcataaaaaaagggagcttacgggctccttttttgttttccctttaccaatcggaaactgcacttacacgtttgatccgtcatgctcaggggtacacatacgaatacatcaccaatgataaaggagagtcttgtatgtctgatgcaaatctgcacaacccgctgacgaaatatgatcatgatgaatttccaaaacaatatcaagaaccgcccggtttgcagaaagagatgaagcctgtgccggactgcggtgaaacgagctataaaggagccggcaagctgaagggaagaaaagccctcgtcaccggcggcgattcaggtatcggccgggccgccgcgattgcttatgcccgggaaggggcggatgtggcgattaactatctgcctgaggaacagccggatgctgaagaagtgaaagcgttaattgaaaaagagggaagaaaagccgttctgctgccgggagatttaagcgatgaagcgttttgcggagaattggcggaaaaagcgtatcaagagcttggcggtcttgacacgctcgctcttgtcgccggcaaacagcaggcagtggatgatatcagcgatcttgccacagaacaaatctatcaaacatttgaagtcaacgtattctcgctgtattggctcgtcaaagccgcgcttccttatctgccggaaggcgcgtctattatcacgacaacgtccgtagaagggtataatccaagcccgatgctgttggattatgccgcgacgaaacatgccattatcggttttaccgtcggcttaggaaaacagctggcgaataaaggaatcagagtcaactcggtagcgccggggccgatctggacgcctctgcagatttcgggaggacagcccggtgaaaacattccgaaattcggcaaggaaacaccggccgttccattaaagcgtgccggacagccggcggagctagcaggaatttatgtctttttggcctcagaagaatcgagctatgtgacatcccaaatttacagtgtaagcggaggaattccgacagcgtaatcaataaggagctgcccttcatacgggggcagctcttttttttgatgttatgtgccgagcacgttttgattatacaggacactcggatgtgacggatgataggaggcggctttgtcgttatgaatcttcgctttttctctgtcgccgagctgccagtggcagacgcagagctgcagatggggataccaggtggaatattcgagctgggtaaagcctgcatcactgcttttggcggatagggcgagctcataccaaaacacgccctgccggtattgccgtttctccgcaaaatagtcgccgagcctgcagcagaactccggccgcggacaatcgatcagaaatgattttaagagagacgtcatggcggcctcttcatggccgaccgccctgtagcaatcggatagatattggcatgttctgatctcgtcttcgatccagcactgttttgtggaaagaaaatggtgataatacgtgatggcgcgctgatactggccgtgatcctttaattcattcgcgaagtaaaacaaatcgcgcggtgtcatcgtttcactgttttccgccattttctcataaatcttcaagttgcggtctgagggaggcgagtgctttttcgcggatttccggtgtgtgacggcaatatcggtttctatgatgtttccgtatacttcaagatactcatgcacggctccgatccagcggaatcctttttcacgcttaacgagacggttgcggcggtatctgaagctgacctctccccgagcatcaaagccgacgtgataatacatggataccgcgtccacctcttttgaaagcgacgccttcagttcaatcagcttttcacggtccttttccgtcaatatatcgtcggcgtccagccacagaatataatccatttccgctttcgaaaacacaaagttacgagcggccgcaaagtgatcgatccattcaaaatcataaatcttatccgtataacgggccgcgatttctttcgtccggtcggtcgagcccgtatcagcaatcacaatttcatccgcaatgtctttgacggaatcaagacagcccgcaagcacttcctcttcatttttcacgataacgcacaaactgacgctgatcatgtcatcacctcttcacctccagtgtataaaaggagaggcggaaacattcttcggacaaaatgatctcttccaagaaatttgtctgtccttttactagttttattccagcgcctgatttaaaatgaacacatgaacttacgtgaggattgatagggaccatgagcatcataaaagcggaaaacctttataaaacatacggagataagacattattcgaccatatctcctttcatattgaagagaatgaaagaatcggtttaatcggcccgaacggaacggggaagtctacgcttctgaaaaccattgccggccttgaatcaacggaggaaggcgagattacggcttcaggaaacgtgcatattgagtttttgcatcaggaccctgatcttccggccggacaaaccgttcttgagcatatttattccggcggatcagccgtcatgagaacgatgagagaatacgaaaaagcgcttcaggcgctgaatgaagaaccggaaaatgaccagcgccagaaacagctgcttgatgcgcaggcccgaatggacgcgaatgatgcgtgggaggcgaatacgttagccaaaacggttttaaccaaacttggcgtcaccgatctgatgaaggatgtcagcgagctgtccggcggccagagaaagcgcgtcgcgattgcgaaaaacgtcatccagccggccgacctgctgattttggatgaaccgacaaaccacttggacaatgaaacgattgaatggctggaaggctacttatcgcaatatccgggcgccgttatgcttgtcacgcacgacagatattttctgaacagggtgacgaacagaatttacgagcttgagagaggcagcctttatacgtataaaggaaactatgaagtattcctggaaaaacgggccgaacgggaagcgctggcggagcagaaagaaacaaaacgtcaaaacctcctgcgccgcgaattggcgtggctcagaagaggggcgaaagcgcgctcgacgaaacaaaaagcgagagtggacagagcggaggcgctcaaagagcaaaaagggccggcagtctccggatcactcgatttcgcgatcggctcccaccgtctcggaaaacaggtgatcgaagccgataacgtcaccattacctataacggccaagcgctgatcagccagtttaatgagcttgtcatcccgggggaacgaatcggcatcatcgggccgaacggaatcgggaaaacgacacttttaaacagcctcgccggcagaattcagcctgacagcggcaatatcaccatcgggcagacggtccggatcggctactacacccaggaccacagcgaaatgaacggtgatatgaaagtcattgaatatataaaagagacggctgaaatcgtcaaaacggcggaaggcgatgtcatcaccgcggaacaaatgcttgagcgttttctgttcccgcgtccgatgcagcagacatatatcagaaagctgtcgggcggggaaaagcgccgtctgtacttgctgaatgtactgatgcaggaaccgaatgtgctgtttttagatgagccgaccaatgatctggacacggaaacattaagcgtgctcgaagattatatcgaacagttcccaggcgtcgtcatcaccgtatcccatgaccgctattttcttgaccgcgtcattgaccgcctgatcgtatttgaaggacaaggtgtcatttcccgtttccaaggttcgtacagtgaatacatggaacacgcaaaagcgaagaagacggcggtaaaacagccggccgaagagaaagaggcggaggaagagccgaagaaaaagcgcaaaaagctttcatataaggatcagatcgaatgggacggcatcgaagacaaaatcgccggccttgaaggaaagcatcagcgtctggaagcggaaatcgctgaagcgggaagtgatttcggaaagattcaagaactgatggccgaacaggcaaaaacggctgaagagcttgaagcggcgatggagcgctggaccgaattgtcactgatgattgaagaacttgagaattaagaaaagccggtacggcccccgagaaagatggcgggtcataccggctttttttatcttacacagatgtctcccggcgctttaaagacaaacgttttgtccaagcaaagtttatcaggcataaaaagttaacgtttacgttaaggttcaaatggtgtataatagaaacagatacgacaagagggggattcaccttggaatggatgaagattgatcaagttgccaagcgaagcggattgacaaaacgaaccattcgtttttacgaggagattggtttgattcctgctcctaaacggacagaaggcggcgtccggctatactctgaagatgatatggaggagctcgaaaaagtcaccagcacaaaagaagtgctcggtttttcccttcaggagcttcagcagtttatggagatgagccgtcagctggaattaaacaaagaggggtacttgttgtcactggatccgaaggaacggaaagaaaagctggaagagattcagcaggctttgaaccaccagcttgagatgattgatgagaagatcagcacatttcagcattttaaaacgcgccttaacggaatgaaagaaaaagctgaccgcgccattcaatcaatcgaatgattttgctgtaaacgctatggatatagcgtttcttttaatggatgaaacaggaggtctggtcaaatggatacatcatcacaacagaaaacaggcttattcagccagccgaaagccgtttgggcggttgcgtttgcctgtgttatttcctttatgggaatcggtcttgtcgatccgattcttccggcgatcgccgcacaattacatgcttcacctagtgaagtatctctgttatttacaagttatttgctcgttaccggttttatgatgtttttctccggcgcgatttcaagccggatcggcgcaaaatggacgctgcttctcggacttatttttatcatcgtgtttgccgccctcggcggaagctcaagttcaatcgctcagcttgtcggctatcgcggcggctgggggcttgggaatgctctctttatttcaaccgcgcttgccgtcattgtcggggtatctgtcggcggcagcgccaaagccattattctgtatgaggctgcactcggcttggggatttccgtcgggccgcttgcaggcggagagcttggcagcatctcatggcgcgctccgttcttcggagtgtctgtcctcatgttcatagcgctttgcgcgatttcactcatgctgccgaagctgccgaaaccggcgaaacgcgtcggtgtgtttgatgcgatgaaggcgctcaaatataaaggccttttgacaatggcagtatctgcattcttatacaactttggattttttattttgcttgcttattctccgttcgtgctggatttagatgaacacggccttggatacgtcttcttcggctggggtttattgctggcaattacgtcagtctttacggcgccgctcgtgcacaaagcgctgggaacagtgggttcgctcgtcgttctctttatcgcctttgcggtcattctcatcgtcatggggatctggactgaccatcagacgttgatcattacgtgtatcgttgtcgccggtgctgttctcggtatggtgaatacgatcatgacaaccgctgtgatgggttctgcgccggttgaacgttcaatcgcgtcttcagcctacagctcagtccgttttatcggcggtgcgctcgctccgtggattgcggggatgctgtcagaacacttcaccgcaagcactccatatacagtaggcgggatcgtcgtttttgtcggcatgcttgtccttctcatgggacgcaaacatctcgccggaataaaagccggacattaagaaaaaaaggaacttccgcacaggcgggagttcctttttgtgtttacagcactttcgtcgtccaagattcacaattccatgtttccgtcgcgatatccatgtaaaactcgggttcgtgggaaatcagcagaatggagcctttgtattctttcagcgcgcgtttcagctcttctttcgcatcgacatccaggtggtttgtcggttcgtcaagcacgagcaggtttgtttctgaattaatcagcttgcacagtctgaccttcgctttttctcctccgctgagaacggagacgcggctttcaatgtgtttggtcgtcaggccgcatttggcgagggcggcgcggatttcgtactgggtaaaggaaggaaattcgctccacacttcttcgatgcacgtattgttattggtttctttcacttcctgctcgaaatagcccgtgtattgatgctcgccccgttccaccgtgccttccagcggctggatttcaccgagcaggctctttaacagcgtcgtcttcccgatgccgtttgcgccgtacagggcgactttctgtccgcgctccattctgagattgagcgggcgtgacagcggagtatcgtagccgatgactaagtccttcgtttcaaaaatgagcttgcctgacgttctcgcaggcttgaaatggaattccggtttcggtttttcggccgccagttcgatcatatccatcttatcaagctttttctggcgggacatcgccatatttctcgtgctgacccgcgctttgttgcgggcgacgaaatctttcagctcagccacttcctgctgctgttttttataggcggcttcgagctgctgttttttcacttcgtagacttccatgaattgatggtagtcgccgacataacgcgtcagctcctgattttccacatgataaatcaaattgatcacgctgtttaaaaacggaatgtcgtgagaaattaagatgaacgcattttcatattcctgcaaatagcgtttcagccattcaatatgctgctcatcaaggtagttggtcggttcgtccaacagaaggatttccggtttttctaaaagcagtttggcgagcagcactttcgtccgctgtccgccgcttaaatcagtgacgtcgcggtcaagtccgacatcctgcaggccgaggccgcgggcgatttcttcaactttgctgtcaatcacatagaaatcattattagtcagggcgtcctgaatgacaccgacatcttcaagcagctgctcaagctcatcagggtccgcttcgcccattttgttgtaaatctcattcatttcctcttccattgcaaataagtaatggaacgcatccttcagcacgtcgcggatcgtttttcctttttcaagcacggtatgctgatcgaggtagccgacacgcacgtttttcgcccattcaaccttaccctcatcaggctcaagctttccggtaataatattcataaacgttgatttaccttcgccgtttgctccgattaagccgacgtgctccccttttaaaagacggaacgatacattgttaaaaagcgcacggtcaccaaagccgtggcttaaatcttttacggataaaatactcatcattacacctctatcgttatcagacacgctttttttatcatgtgtctttctcatttatgattataaaggaggagaccgtttgttaaaaggcttggaaggaaaaagaaaattgcgtttggcgcgtgcatttgagatactatggagtagattttaagaattgaggagaacgacatgacccaaacatggccatttttacagcatacacaaccatttatcgccgaaaactgggaggcctcaggctttcaggagccgaccgtcattcaggaaaaagccgctcaggtgattatggaagggaaagacgtcatcgccgaatccccgacgggaacgggaaaaacattggcgtacacgcttccggttctggagcggatcaacccggaacagaaacatccgcaagtgatcattttagcgccgtcccgcgagcttgtgatgcagatttttcaagtgattcaggattggaaaaaaggctccgatcttcgcgctttgtctttgatcggcggggcaaacgtgaaaaagcaggtggagaagctcaaaaataaaccgcatatcattgcgggcacaccgggcagggtgctcgaattgattcaggcgaaaaagctgaaaatgcatgaagtcaagacgatcgttcttgatgaagcggatcagctcgtgacacaggaacaccgcgaaacgatgaaaaaaatcattaaaacgacgctgaaagaccgacagcttttaagcttttccgctacgctgcagccggaaacagaacaggtgctgaataccatcgcacatgaaccggctgttttgaaagtggagcggaatacggcggaaaaagcgcgcgtcacacatcaatatctcgtctgcgatcagcgggataaagtaaagctattgcaaaagctgtcacggctgaacggcatgcaggcgctcgtgttcgtcagagatatcggaaatttaagcgtctatgcggaaaaactcgcctatcaccacgtggatctcggcattctgcatggagaagcgaaaaaaatggagcgggcaaagatattatcagcgtttgaacggggagaatttccgctgcttctggccactgacattgcggcgcgcggactcgatatcgatgatcttccgtacgtcattcacgcggacatcccgaatgaagacgggtacattcacagatcaggccggacggggcgggccggtaaagaaggaaccgtactcagccttgtcacgccgatggaagaatccaaattgaaaaaaatggccaaatcactcggaatcgagctgaaagaggccgtttattcaggcggaaaattatctgagaaataagaaacggagggcgggaagcccttcgtttttttttgttgtaaaataatagaaaaggttcaggcgggggcgggaagatggtttcaatagacagatttcaaatattgaaggaacgtgagctgaaaatacttgaacactggtttaagaacgataatatcagacggagaatggatgcgatgctgccattagacgcgtggtatgcacgattgaataaagatgaagacgatactgtcattatggcatatgacggggagtgtccggcaggcatggtctctatagagtttgtggaggagcgggcgtatatcggattgatcgtcaatcctttgtaccagcttcaagggtacggaaaacagatcttgcaaaaactgctgactgatcctgggtttaccggcgtgcgggaatgggcggcaagcatcgaaaaagacaatcaaatcagtttagcctgctttcaagcagcgggattcactttggaagatatggagccggatgaagacggctttcttactttgattcttcgcggctgatgcgaaaaaaagaaaaggaggggacaaagccctcctttttttcatcatcatgttaacttagatcactcactttgatgatctgtttgcctttgttttctcctttaaacaggccgaggaacgcgtcaggaatattgttgaatccttccgtaatcgtttcttcataatgaagctttccgtccttaagccattcggccaattgtttcgcaccttcggaaaagcggtcagcataatcactgacgatgaatccctgcatcagcgcttttgttttgatcagcttcggctggacgcgggggcccatgtcttcttcttcactttcggtattgtacgatgagatcgctccgcataccggaatgcgggcgaattcattcagcaggtttatcaccgcatctgaaatcggtccgccgacattgtcaaaatagacatcgacgccgtcaggacatgcctgttccagcgctttttgaatatcatccgccgttttgtaattaatggcttcatcaaattgaagctcctctgtcaaatacgcgattttttcatcagatccggcgatgccgacaacccgcgcgcctttgattttggcaatctgtccgactgttgagccgacggcgcccgccgcgcctgaaacgacgacggtttcgccttttttcggacggccgatatcgagcagcccgaagtaagcggtcagtccggtcatccctaaaatgccgagatacgcctgggcgggtgcgatatccgtatccaacttgcggagggcggactcattgacggctgaatattcctgccacgcgagatttccgatcacaacatctccttttttcagcttatcgccgtctgtcagaacctcggcaatcactccgcctgttatggcttcatctaaagcgaacggctctacatatgattttgtatcctgcatccgtccgcgcatgtacggatcaacggacacataactcgttttcacaagcacttcgccgtctttcggttcgggcacggcaatcgtttcaaagcggaaatcgtcatgggcgggaacgcctttggggcgtcttgccaattgaatttgctgctgatgattcggcatactgaatcctccttcaagataagtggttgttccaaatgtaacacgaaccatttcccgattacaaaatcaaaccgtcagcggtcataaaaaaagaagggcccagggcccttctttccttatatgcatatttaatagaataaccggtacacatcggtgtttttctcatgttccaaatattcataggcattcgtttttgaagaatgaagcatgtcagcggtaacgacgggctgaagcgcggtcagataagaacccagcctattttcaatttctttcggcagaacggattcgatatcaccgatattgataatgatagagaaaacgaaatcgatattaatatgaaaagtatcttcagcaaaggccgtaagctcttttattccatccgggcagcgggtatgccggcggaatacctgcttcactaaatcactgacaacccaagcgttaaatcgctgttccggtgaaaagtaatgaataggaaccacctccctgcttaatcggctcatgaagatttttatttttctgataaaagttgctttttctactgtaacatgtcccgccagaaaatatccaccgacaatctgcccgttttcccactgaactctctttcttttgtttgatccttgattgatcgggtaaacatccaatatacaaaacaaaagggaggacttatcaatgaaaccggtagtaagagaatatacaaatgatcaaaaactgatgcaggacgtaaaagagcttcagcaattgggtgtcgcaaaagaagacgtatatgtgctttctcatgatgacgacagaacggaccgcctggccgataatactgatgtcaataccatcggagcgaaagaaacgggcattaaacacgcggtcggcaatatgtttaataaaaaaggcgacgagctccgcaacaaaattcacgaaatcggcttttcggaagaggaagcatcgcaatttgaaaagcgcttagatgaaggaaaagttcttctgtttgtcacggataacgaaaaagtaaaatcatgggcgtaagctgaacagatcccaaggggttttcggtcccttgggatttttttgcggtttccgcaataaaaccgaaaggcacattctgtacattttcggtgctgtttctcaactgatttgatacaattcgattgtaataaattggaacaaagaatcaggaggagcacaattcatgaaaaaaatgttatttatgctggcggtttgtttatgtatgatccctgcggacgtctatgccgctgatctgggacggcagacgttaggaacaaatgacggctggggagccgcttccggcgggacaaccggcggcgcgaaagcctcttcatcgaatgtatacaccgtatcaaacagacagcagctcgtttccgcattagggggaagcgccaacagcacgccgaagattatttacatacaaggcacaatcaatatgaatacggacgaccgcaataaaacactcggctttaatgattataaagatccggcatatgatccgaacgcctatctgaaggcgtacgacccggacaaatgggggaaaaaagcgccgtcaggcacccaggaagacgccagacagcgatcgcaaaaaaaccagaaggcacgggtcgtgattgacatcccttcaaatacgacgatcatcggctcgggttcaaatgccaaagtgacaggcggaagttttaatataaagaacggcgtcgacaatgtcatcatccgcaacattgaatttcaagacgcttacgactattttccgcaatgggacccgacggacggcagcagcggcaactggaactctgaatatgacaatatcaccattaacggcgcgacgcacatctggatcgatcattgcacctttaatgacggatcgaatcccgacagcggttttccctactattacgggagaaaatatcagcaccatgacggccagacggatatagccaacggggcgaattatattacattgtcctataataaatatcatgaccatgacaaaggctccgtcatcggaaacagcgacagcaagacgtcggatgaaggaaaactgaaggtgacccttcaccataactattaccagaacatcgtccagcgcgcaccgcgggtccggtacgggcaggttcatatttataataatttttacgcaggctctaaaagcgccgcatacccgttcagctatgcgtggggcgcgggccacgcgtcgaaaatatatgcccagaataatgtttttgaagtgccgggactggctgctgataaagtcatcagcgtcttcagcggcggaaaagcgcttcatgaagacggcactcttttaaacggcgccgccattaacgcgtcggccgccaacggattaagtcagtccgtcggctggacaccgtcattgcacggttccatcggctcatcatcaaatgtaaaatcagatgttatatctaaagccgggtcgggcatattaaaataataaacaagaagcacaaaggaaaatattcctttgtgttttttaattaacaaaaacgtttattaacttagttaagtagtaaaatgggataggggatggaagacaacaaaataggaggagacctgtaatggcttcagaaaaagacgcaaaaaaacagcaggcagtaaaaatcattcctttgcttattactgttgctgtgggattaatcatttggtttattcccgcgccgtccggacttgaacctaaagcatggcatttgttcgctatttttgtcgcaacaattatcggctttatctccaagcccttgccaatgggcgcaattgcaatttttgcattggcagtcaccgcgttaacgggaacgctatctattgaaaatacgttaagcggatttggaaacaagacaatctggctgattgtcatcgccttttttatttcccggggtttcatcaaaaccgggctcggcgccaggatttcttacgtattcgtacaacggttcgggaagaaaacactcggcctttcttattcactgcttttcagtgatttaattttatcacctgccattccgagcaacacggcacgggcgggcggcattatttttcctattatcagatcattatccgaaactttcggatcaacgccggcagacggaacagagcggaaaatcggcgctttcttattaaaaaccggttttcaaggaaacttgattacgtctgcgatgtttttgacggcaatggcggcgaacccgctgatcgccaagctggcccacgatgtcgcaggggtggacatcacatggacaagctgggcaatcgcggccattgtaccgggattggcgagcttaatcattacgccgctcgtcatttataagctgtatccgccggaaattaaagaaacaccggatgcggctaaaatcgcaacggaaaaattgaaagaaatgggtccgtttaaaaaatccgaactctccatggtcatcgtctttttattggtgcttgcgctgtggattttcggaggaagcttaaatattgacgcaacgacgacggccctgatcggattatccgttttgcttttgtcacaggtattaacatgggaggacatcaaaaaggaacaaggtgcatgggatacgctgacttggttcgcggcgcttgtgatgctggcgaatttcctgaatgagctcggcatggtgtcttggttcagcaatatgatgaaatcttctgtttccggtttttcatggattgtggcatttatgattctgattgtcgtgtattattacacgcattacttctttgcgagcgcaaccgcgcatatcagcgccatgtatgcggcatttctcgccgtcatcgtggctgcaggcgctccgccgctgttggcggcgctcagcctggcgtttttcagcaaccttttcggttcgacaacgcattacggctcaggagcggctccggtctttttcggagcgggttatatatcgcaaagcaaatggtggtccatcggctttatcctgtcaatcgtccatattgtgacatggcttgtgatcggcggattatggtggaaagtattagggttatggtagaagaaaaaaaggcagactcaggtctgccttttttttatttctgtaaggaaggggaagggcctgcacatgatgactccagtgcgaatagaatatggacggggtgataatatgagcagcggccgtaatcaatacatgatattgaaacagaaaccttacaaatatatgagcagacatatgaaacgccggtatgaacaattaccatgtgaacatgaaaggccggaaacagggacagaaaaacggtttccgtcttcagatgaaaatcgatctgccttgtgcgtacccgggctgcgaggtcccgaaggcaaaagaggacccgccggctcccgcggtccgcaaggggaggcgggtccgcccggtcccccggggcctgaggggccgccgggagcggttcctgcggtagcttttcaaaatacagcagaccagatgatgattccgttagaaggaacaccgataaacgtgttaagcgcagtgatagccgcgccgacagatcaattggtgaaaacggatgccgtcatacaagtaaatgtggaattagatccgctcgcgtctcatttctcattggtcttagctgtcgatctgcaaagaaatggcgtatcgatacaaacacagagacaagagtggaacctcttttcttcaggcggacaaatcataggaattccttttacgtacatcgacgaaatgaaggcggatgaaacagccgcgtaccagctctatttatccgtcctttcttcgaattacgtaacacaagtcgcagcggcaaaccgctccctcattgcgacgggattccccattcaaggatcggattaaggtgatgaaaagaaatcaccttttttatttagattgtcaaaacacagcccgtattaataagctgtcttaataagtaagacggtcaacaacgggaaggagagggaaaaagattgaatgaataatccgattataaacggaagctttgaaaccggtacattagcggggtggagttcggcaaatacccagattaacagtttgtttgcacattcagggagatattctgcgcaatttattggagctcagccatatgcttacctcagtcaaatcgttccaatttcagccaagtcagtgactctattcgtatcactcgcaacgctcggaaatgagccaagtccccaagtaactctccagatcatctatgtcagcgcagcaggtgaacaaatcagttccattcaagaaaatattacacccggaaatttgccgaacgtgctctttcacacatggtctgaaatctataaaacaagcagtgtgccttctggcgcggcctctgccgtcattgtattaagtaaagtttcttccggcacggttttaatagacgacgtttcattggcgcaaaccgggggtgaacctggcgtaacgggaattacaggtcccacaggagtgacgggccctacaggagtgaccggagcaagaggagcgacggggtcgacaggatcaacgggtgtaaccggccaaaccggagtgactggtccgacaggagtaacaggggcgacgggagtaactggagctaccggctcgactggtgtaacaggagcaagaggagcaaccggaactactggctcaaccggagtgactggagcaagaggagcgaccggagtaactggtgcaacgggagcaaccggaactactggctcaaccggagtgactggagtaacaggaacaactggcttgactggtgcaacaggcccaactggttcaacaggagcaaccggagaaactggcgcgacaggctcaaccggaataacaggggcaaccggctcaactggagcgacaggtacaacaggcctaacgggtgtaactggtccaactggagtgactggggcaacggggataacaggatcaacaggcccaaccggccccaccggagtaacgggtccaactggagaaacaggggcgacaggagaaaccggtgcaactggatcgacaggagcgactggggtaacgggtgtaaccgggggaacgggaacaaccggaccgacaggcgcaaccggcttaactggtgcgacgggattaactggagaaacaggcgcaaccgggggaacaggtccaacgggtgtaacaggagaaaccggttcaactggagtgactggtgtaacaggagaaaccggttcaactggagtgactggtgtaacaggtgcaaccggagaaacaggtccaacgggagtgactggctcaactggtgtaaccggccgaaccggaataacaggctcaacaggaacgaccggctcaactggtgcaacaggcccaaccggatcgacaggaccaactggttcaaccggttcaactggagtgactggtgtaacaggtgcaaccggcgcaacgggatcaacaggcccaacaggatcaacaggcccaaccggtgcaacgggagtaacaggcccaactggtgcaacgggagtaacaggcccaactggtgtaactggttcaacaggagaaaccggagcgaccggtgtaactggctcaaccggtgcaacaggagcgaccggaataacgggatcaaccggagcaacaggcgcaactggtgtaaccgggctaactggaataacaggcgcgacgggcccaaccggtgtgactggaccaacaggggttactggctcaacaggagaaaccggttcaactggagcgacaggatcaacaggcccaaccggtccaactggtgcaacgggggtaactggagcaaccggagcaacaggcgcaactggtgtaaccggctcaaccggagcgacaggatcaaccggcccaacaggcgccaccggaaaaaccggttcaaccggctcgacaggcgcaactggctcaacaggtataaccggagcaacaggatcaactggagtaacaggatcaactggagtaacaggcccaacgggagaaaccggtccaacaggatcgacaggttcgactggggtcacgggtgtaaccgggagaacgggaccaaccggatcaacgggcgccactggaataactggaataactggaacaactggtgcaacggggtcaactggggagactggtccaacaggagaaaccggagaaactggtgcaacgggagtaacaggctcgacaggagcaactggtgcaacgggagtaacaggggcaacgggagaaactggcccaactggatcgacaggcccaactggatcgacaggcccaacaggaattaccggagcaacgggatcaactggtataacgggaccaatcggggcaaccggaataacaggagcgatcggaataacaggcccgaccggggatacaggagcgactggtgtaacggggacaaccggggtaacaggttcaaccggagtgactggagcaataggtgaaacaggagcaacggggctgactgggccaacggggttcaccggagtaacaggcccaacgggagtaacaggagcgaccggtgcaactggatcaaccggcgcaacgggtgccactggcataaccggagcaactggggtagcaggtccaatcggagtaacggggttcaccggcgcaactggtgtgactggcccgatcggcacaacaggagcgacaggctcgactggcctaactggatcaacaggagcaacaggagaaaccggcccaactggctcaaccggagtaactggctcaaccggagtaactggctcaaccggggataccggtccaactggagtaactggcccaactggagtaactggcccagcaggagtaacgggatcgacaggatcgactggggtcacgggtgtaaccgggagaacgggaacaacaggagcgaccggaataacaggctcgaccggtccaacgggggagactggaccaacgggagtgacaggcacaaccggaataacaggggaaactggggcgacaggaataacaggcgcaacaggtataactggagaaaccggcacaaccggcccaacaggtgtaactggggaaacaggtccaacgggatcaactggtataactggaataaccggctcaacaggcgcaacaggtggaaccggagtaaccggaatgactggtgcaacgggctcaacaggatcaacgggggtaactggagcaaccggagaaacaggcgcaactggtgtaaccggcccaaccggcgcaataggagagaccggtgtaacaggaataaccggagcaacggggtcgacaggagaaaccggttcaacaggaacaactggagaaaccggctcaaccggtgcaacaggggcgactggagtaacaggctcaactggtgtaactggttcaaccggagcaactggcccaaccggagtcacgggctcaacaggagtaacaggctcaaccggagaaacaggtgcaactggagtaactggggcaacgggagaaaccggcccagcaggagtaactggcccaacaggagtaaccgggtcgacaggaataaccggatcaacgggagtgattggggccacaggaataaccggagcaaccgggccaacgggagtaacaggagcaacaggcccaactggtgtgactggcccaactggggcgagtggtgtaactggtccaactggagaaagcgggtcaacaggagaaaccggatcaacaggagttactggcccgactggggtcacgggctcaactggtgtaaccggagtaaccggatcgacaggagaaacgggatcaactggtgcgacgggattaactggagaaaccggcccaactggaattacaggaacaaccggagcaacgggatcgacaggagaaaccggcccaactggaattacaggaacaaccggagcaacgggatcgacaggagaaaccggctcaaccggtgcaacaggggcgactggagtaacaggcccaactggtgtaactggttcaaccggagaaactggctcaacaggtgtaaccggtgcaactggagtgactggagtgactggggtaactggtgtaactggcggaacgggaacaacaggctcgactggtgcaacaggaccgactggatcaaccggcccaactggcccaactggggtaacaggatcaaccggtgcaactggagttactggcgcaaccggagtaacaggcgcaaccggcccgactggtgtaacgggatcaactggtgcgacgggattaactggagaaaccggatcaacaggagaaaccggggcgaccggtgtaactggtgcaacaggagtaacgggcacaaccggtgtaaccgggtcgacaggaataaccggagcaacgggagtgactggggccacaggaataaccggagcaaccgggccaacgggagagatcggcccaacaggagtaacaggagcaacaggcccaactggtgtgactggcccaactggggcgagtggtgtaactggtccaactggaggaagcgggtcaacaggagaaacaggatcaacaggagttactggcccgactggggtcacgggctcaactggtgyaaccggwgtaaccgggtcgacaggaataaccggagcaacgggagtgactggggccacaggaataaccggagcaaccgggccaacgggagagatcggcccaacaggagtaacaggagcaacaggcccaactggtgtgactggcccaactggggcgagtggtgtaactggtccaactggaggaagcgggtcaacaggagaaacaggatcaacaggagttactggcccgactggggtcacgggctcaactggtgtaaccggagtaaccggatcgacaggagaaacgggatcaactggtgcgacgggattaactggagaaaccggcccaactggaattacaggaacaaccggagcaacgggagtgactggaacaacaggtgtaaccggcccaacaggtgtaacaggaacaaccggagaaacgggatcgacaggagcgactggggtaactggtgtaaccgggggaacgggaacaaccggctcgactggtgcaacaggaccgactggatcaaccggagaaaccggcccaactggggtaacgggctcaacaggagaaactggctcaacaggagaaaccggggcgacgggagaaaccggatcgacaggtgcaaccggggcgaccggtgtaactggggcaacaggaataaccggagaaaccggcccaactggggtaacgggctcaacaggagtgactggagtaacaggcccaacaggagtagccggatcgacaggagaaaccggatcaactggtgcgacgggattaactggagtgaccggagtaacaggtgcaacaggagcaactggctcaacgggagaaacgggtccaactggtgtaacaggcccaaccggatcgacaggagaaacggggtcaactggagtgactggggcaacaggcccagcaggagaaaccggagcaactggaccawcaggagcaacaggatcaacaggagaaaccggaaccacgggctcaaccggatcgactggagtaacaggtccaactggtgtaactggttcaaccggagaaactggtccaattggtgtaaccggctcaaccggcccaactggggtcacgggctcaactggggcaactggctcaacaggagaaacgggtgcaacgggagtaacaggcccaacaggagcaaccggctcgactggttcaacaggcccaactggtgtaaccggctcaaccggtgcaactggagtaactggagcaacgggagaaactggcccaacaggaggaactgggtcaaccggtgcaacaggggtaactggagaaatcggtccaaccggagtaaccggtgccacgggagaaaccggcacaaccggagtaacaggcccaactggtataaccggagaaacgggctcaactggagtgactggggcaacggggataacaggagcgactggcgcaaccggagtaacagggtcaacaggagtaaccggcgtaacgggatcgaccggaataacaggcgcgacaggcttaaccggtgtgactggcccaactggtccaacgggagtgacaggatcaaccggatcgacaggagtaaccggtccaacaggcacaaccggagtgactggtgcgaccggagaaacaggatcaaccggagcaacgggtgcatccggggtaacggggtcaaccggatcaaccggcataacaggcccaacaggtgtaactggtataaccggatcaacgggtgtaacaggagtaaccggcccaacagggtcaacgggggtaactggagaaaccggatcaaccggcataacaggcccaacaggtgtaactggtataaccggatcaacgggtgtaactggagtaaccggcccaacaggtgtaactggtataaccggatcaacgggtgtaactggagtaaccggcccaacagggtcaacgggggtaactggagaaaccggatcgacaggcgcaacgggcctaaccggctcaactggattaacaggcgcgacaggaataaccggctcaaccggcccaacgggaggaactgggttaactggtgcaacaggagtgactggcccaacaggtgtaacgggattaacaggcgcaaccggctcaaccggcccaacgggaggaactgggttaactggtgcaacaggagtgactggtccaacaggtgtaacgggattaacaggctcaaccggcccaacgggaggaactgggttaactggtgcaacaggagtgactggcccaacaggtgtaacgggattaacaggctcaaccggcccaacgggaggaactgggttaactggtgcaacaggagtgactggcccaacaggtgtaacgggattaacaggcgcaaccggcgcaacaggctcaacaggagtaacgggcccaactggagcaacaggaccaaccggcgccacaggcagtacaccaaccttgctcttcacaagaaccaacgggccgctcactgtttatccgccgttaaatacagaagttcccattgctacgctggcaatcccggttaacgctttgcagaatgtaaagcttgattatgcactcagtgtcgcgctaacaactgcagccaattcaaactttgtttttgaggtgagattatataggggaacagtacaaattcatacaagaactctgtcgcgaactagtactaccgcagctacggatagtttttcgattgctgatacaacagtggatacagcaccgaccgcaggaacaaatacgtaccagctgagagttattttcacaactgcgaataatataacaacagcgacagctctcaatatcgattttaacagcattcgtttcccgacaacctaatacaacagcagactgatattttaaagatgaaagacctgacttatgcacagttaggtcttttttctgtaaatgctgcatgatgcagccttaaagaacatttaaaaatttgcccaatagaagtggggttttgccacacctttttttatcatggaaatattatgaaaatagaggtggtgtaatgagaaaaggagatacttggtataacagatacgactcttgggattacgactgccggaatagtaatgagtgttgctgtcattttcaacataaaagaagaaatcaaaggcgcagttatcaaaatcgggcacattgctgtgaaggattctgttgcgaaaactcttgctgtcatgaaagatggtgtccatgctgtcatccaaatcattttcatgtaagaggattcaccggagcaacggggtgcaccggagcaacggggctgaccggagcaacagggctgactggagcaacgggattcactggagcaacggggtttaccggagcaacgggctcgactgggaataccggagcgactggggtaaccggcgtcactggagatcccggcgcgactggagccaccggcgccacgggagcaacgggagtaacgggctcgaccggcgccaccggcgcgactggaataaccggtgccaccggggtaacgggagcaatgggattcaccggagcaacgggagtaacaggctcgactggaataaccggcgccaccggggtaacgggagtaacgggagtaaccggagcaaccggtgtaacgggagctaccggagcaaccggagcaaccggcgcaactggggtaacgggaacaaccggagtaaccggagcgaccggggtaacgggagccacgggagtaaccggtgcaactgggataacgggagccactggggtaacgggagcaacgggagtaacaggctcgactggaataaccggagcaaccggggtaaccggagtaacgggagcaaccggagcaaccggcgcaactggggtaacgggarcaaccggagtgaccggggtaacgggtgccaccggagtaaccggagcaactgggataacgggtgccaccggggtaacgggagcaatgggattcaccggcgcaacgggagtaacaggctcgactggaataaccggcgccaccggggtaacgggagctaccggagcaaccggcgcaactggggtaacgggaacaaccggagtaaccggagcgaccggggtaaccggagccaccggagtaaccggggcaacaggagcaaccggggtaacgggagtaaccggagcgaccggaataactggagcaaccggagtaacgggggtaacaggggatactggagcaaccggagcaaccggagtaaccggcgcaactgggataacgggagccacgggagtaaccggagcaaccgggataaccggagatactggagcaaccggagtaaccggagcgaccggaataactggagcaaccggagtaacaggagtaaccggagtaacaggagtaaccggagatactggagccaccggagtaacgggagccacgggaataaccggtgcaacaggagtaaccggagcaactggggtaaccggagcaactggggtaaccggcgccaccggagcaacaggagtaaccggggtaaccggagcaggcgcgatcattccttatgcttcaggtcttcccactgccgtgacgaccattgccggcggattaatcggaacggtgagccttgtcgggttcggcaattctgtaacgggcgtcaatgtcggagggggaggtgcaattgatctcaccggggccggaggaactctgctgaactttgctttttctgctccgagaagcggaaccattacatcaattgccgcttatttcagtacaaccgcagcattgtcgcttgtcggctcgactgttacgataaccgcacaattatacagttccacagtgccgaacaatacgttcacgccgatccccggagcatccgtcactttagctcctcccctcaccggcatattgtcaatcggcagcatcagcaacggaatcacgacagggctgaacattgcggtaactcctcaaacccggctgttaatggtattctccgccactgcgacaggcctttcgcttattaatacagtggcgggatatgcaagcgcgggagttacgatttcttaagtgaaaacggccagactggtgcggatcatctaagcttggagaagatatcactttttcttcaagcttttttgtttttacgtctttttgggtaaataaaggctgacgggaattccccgacagccggcagaagtatttacaagccttctgaagttaatcagtatcttaatgaagacgtctttagtgagttcgaatcatccgttgtgccgggagtgtgaatcatcatcgaaacagcggtgccctcatccggggtgctggtgatcgtcaattcacttccgcaaaaatgcttcagccgccgattgatatttttcaggccgacactgcgattaacgtcagaagataaaatatctttctgtatgtccggcatgatgccggttccattatcctccactttgataaaatacgtgttttcgccttgttttttcgctgtcagctttatccgtccgccgcctcttttcttactgatcccgtgatgaacggcgttttccaccaatggctgtatcattaaaggcggaagggggaagtcaatgtcctgttcaatatcaaaaaggatatcaatccgtttgccgaagcgtgttttttctatagaaagatatgacgtaatgatagaaagttcgtttctgaatgagctgatgtccgaagtgttttgaaaatcaaaactcatccttaaatagtttgtaaatgcagcagtcgtttcccgtgctttttcaatatccaaatggctgagcgcgatgatcgtatttaatacattgtaaagaaaatgaggcttaatctgcgactgaagaaatgccatttctaaatttgtggcttggtgagccgtatgcttcatcaaaattaaatttttaatacgcgcggtgaattcagagtaatgataaggcttttgtaagatgtcgtttgctccggcatgaaacgccttgtatttgtcatggctgataatggctgccgtaacgataagaaccggcagatcgaccatgctgaatctttcgcggatgtttgtgcagacttcaaaacccgtcatgtcgggcatcatcaggtctaatatgaccaggtcaagcttcgaggaagagacagcttgaagcgcctcttttccgctttttactgcgattacgttataaggaacaccttccagcatatcagttaaaattttcaaactctcgatgttatcgtcgacgatcagaatcgtcggagcatcgattttttctgagtgataaggcgtgaccagcgaaatatccgacattctctgtccgggctgtgattcaggaggttcggtctttgcttccggtaaagaatcaatttgagcggcgggtaacgtaaaatgaaaggctgatccgtgcgccgccgctgactccgcccagatgtccccgttttggagcttgacgagctgtttcacaatacttaaacctaaacccgttccatcttcttctgtccctcccgcttgctgaaaagaatcaaaaatggtttcaagatcagcctcaggaatgccgctgccggtatcggccaccgtgatttgaatcattttgtcattcaggttttcagcagaaagaataatgttcccttcggatgtgtacttgattgcgttttcaacaagattggttaagatttgccggaatcggttttcatctgcaagcaccaaagggaggccgtccggcacatgattaagaatggcaagttttttatgtttggataaaagccggtagaagttcatctcactgcatatgacggcatgcacatcgacgggaaccggacgaatctgcagcataccctgcttcattttttccaaatcaagaatatcatttacgagatcggaaagtctgtagcccatacggatgatcagctgcatattttctttctcttcctctatcgtcttcttttttctgccggctacaagagtttggcatatattaataatgctgttcagcggcgtcttgaattcgtgtgaagttttggcgataaattcatctttcagttggtcgattttgactaatttccgtgagaggacttcattgtcccggaaagctccggcgaattgctgcgccatcagaagaaccaccgccaataaagcgatgactgtcggcaatgaatagagcgaattaaaagaaaaagccgttttgccgctgtaagctgaaatggtcgtaagaatcacaaaagcgctcatcgagacggatgcgagtgtaaggtacgtgcttccttttatttttcttatggcggcaatcgtaaaaatatatgtaatataaaacagagtcgtaacggcaagcacagaatgtaaaatgtatgagagatggtcaatgaaacttccggacataaaatcagtgatcaagatggtcccggataaagcggttaaaatggtgatcgtcgtttttgaaacaatttctctgtatgcataaaagagataaagaaaaaccgccatgctgacaagcacggttgagatgatacgcaaggaattcagcaatgaaaatgaaatagacggaaagaggagaaagataattctttctttcccgatcataagaataatggcagaaaaaagcagacacatcacggaaaagaacaataaatgtttatcctttgtccgttgcagaaaaaagccgagaaaatataaaccggtaatgaaaaaagccgtaatcataatggaatcattgaaaaaggaaatttgattctcacgtataatttgttcttgagtcccaaacgttattggttttgcgatcccccagccgggaacttttccgaaattcgaaaaatgcaggacaagttcattgtcacccttgtgaagcctgaaaaaactgctgtacggtttgttctgcgccttaaaatcagctttttctgaaggattgccgctctgtccgattacttttccattaaggtaaaggcggtttgaactgtagataaaagatgtgctgatccccaaaacctgattgtcttcatttgatcggattgtcagtttgtacgtcccgtaatccacatcggccgttttgccgaacagcttcacattgacagggacatcaacgagtacgggattttttccttttgctgaatgaagcgcctgcggtgacagcatctgatttggatatagaatccatttcccgttcagctggacatttccatccttttgaaaatcccacttttccagattgatcacgccctgttccgcttgggggagggatgatcctgaaaaatgattcaggaccataaaaatcataaagaaagcagcgtagccgcaaataatcgaaatggaaataaatttttctttcacatcattactcctttatcccattcaggggcattctattatcctatgtaatgtataaatattgtaatcacaaacgttgtaatacaacaagagaaagaaaaagaatccaactatatagggcattggacatggtataattgaaattattttcagatatatctatattgacgggtgggatgcggtttgaaagcgttaattgtggatgatgaggaactggcattgcttcattttaatcgtatgcttgagcggacaaacgcctttcaatctattataacgtttcaagatccggcggaagttctggagcattcggagctttcatcagctgatgcggtgtttcttgacattgaaatgcccgggataaacggtattgagcttgctgaatcgattcaggaggtcaatgaaaatatccaagttatttttatcaccgcttataatgaattcgcgatcaaagcgtttgaattaaatgctgtcgattatcttttgaaaccggttgacaatgcccggctgctgacaactgttgagcgaatccgaatgaataaaaaactcaggacggcagaagagaataccgggacggattatgttatacaatgttttgggaacctggacttttatcaatcggtaaatggtgtcaaaacatacataacagtcaagtggagaacatccaaagcccgtgaactgtatgcatttttacttcttaatcaagggcgcacggtcagtaaagacatgctgatggaaatgttttggcctgcttatgatatatcaaaagcaagcacccagctctactcgacaatatatcagatacggaaattaatcggtcagctgcccttcagccaatcaatagaaaataccgatataggatacattctccggctttccggggtaaaggttgatacagttgaatgggaaaaaacattaaaagaggctcctccgctcagcgcagctgcactaacccggcatatggacattgtcatgtcatatgaaaaccattatctcatggagaatggctatctgtgggcggagccggaaaaagcgcgtctggcccatttgtggctcagcaaagcgtacgaactgattggttttctcatccaagagaagaatgatcatcaagcgatggacatttgcctgcaggttgagaaaatagagcccggtgacgataaaattatacaatacaaactgcagttatttaataaactgggaaaggtagaagaggcgataaaggaatacgaacgctataaacaattaaaagataaaatcaattgacgattgaatgaccggaccggctgatgccggtctttttttgtgcgctatttctgaaatgatcccatgtacagaatttgtataggccgatttcatacaatgtagtttggttcggataaggagaatcccatgcttaccggcttgttcgaacgtaagtctatataaaaggggaggaataagacttgggagtgaggaacttttcgttcagcccgaaaaaaagcaaaaggctgaggccggcattgatttcatgcttcacgctgtttttcatcttcagccaggttgtcagctttactccgatcgcagccgcttccggatcacaacaaagcgagagcgggttctttgattcagttgcagtcaaagacggcagacagcagactgttgacgggtcaaaagccagtgaaccggctttagcaccgggagataaagtgacactgacatacgaatggtcactaaaaaacaaggaagatgcaagcgaccggaatatcaccataaagattccggaaagttttacattagataacgatgccgaaggtgagctgacatcagctgatcgggtgatcggtatatataaagctgaagcaaacagcagcacgctggaagtgaaagtgaacgatgctggagcggatgccggggatgccaaaggctccattacactgtcggcgaagtttactcccgacataacagatgagacgaaaatggcaaaagctctttttcaactggatgccggcaagacccagcaggtgttaatacctgtgaagaaagacggaacaacggattccgaaacagaaaaaaacacctcttcaacacctgctgaacctcaggaaaagacagagaaaaaatcagcatctgcagacggcggggagaaagcagaacagacaacgaaaccaaaaccttctgctaaacgcagtcaatcaaaaatggcggtttcaagcaaatctgccgctaaaagccttcaatcaggcggaagccggattacgcaaaatattttaactgatgtgaaattgactgatgaaaaaggaaaaccatatgacaaaaacaaccctgcgaatacgaactctccggcaaatatcaccattcaatgggcgattccgaatgagctggggaaaacaataaacgacggtgatcgatatgaatttgatctgcctaaagaatttatcatgcataatgacattacgaaccagccattgaccgacggcgatagtacgtacggaactttttccattaatacgagcggccatgtcatcatgacgtttaacggcgaggtaaaagaagattctaacgtcaaggggtcattgtatgtaaacacccaattcaatcagaaagaaataaaaggatcaaccacacaaaagattaagtttccggttaactctgatacgccggacgtaacggtttattttaaaccgaatgtcaataaaaccattgagaaatcagggtcattcgataaaggtattaatcccggaaaggtaacgtggacggttgatcttaataaaaaggaagaagaagttaaaaatgcgaaattgactgaaagccttccggacgaattgattttccgctctgtgaaagtgtatgaacttgatgtgaatattgacggctcggtgagtcagggaaatgagataacttcaggttataccgttggcgaaaacggtagtgtcaccttcgccgggacgatcgattcagcctaccggctcatatatgacacggaaattaaagatgaggcaaagccgggtaaaggcggaaacatcacgctgacaaacaaggcggcattcagcggagacaatgcggagccgatttctgcggaagcttccgtaacagcgggttacggaaaaatgatagaaaaatcttcgacaggttataaaggagaatcccaaacgttcagctgggctgttatgtacaactacggtgagaaaaagattgatcaatccaaagccggcatcaaggatacgttcggatcagacgatctgcatcttgttcccggttcattgaaaatccttccgattacattcagccagaacggcagcgaacaagagggcgccccattaaaagagggtgaggattatacgctgactgataacgggaacgggtttgaaataaaattcaagcaaactgtcacaggagcatataagatcatttatcaatctcaagtcaacgatggggtcattattgacagtcctgtcaaatacaccaatacagcaatgacagatacaggggaatcaaaggaaactccgggaaccgccattcagcagaatctgatcaaaaattattcaaatgcagactatgagaagaagacggttgattggacaatcacagttaataaaaacggttacacaatgaaagactggacgctggatgatcaattcaccagcggaggcctggcgctcattgacgattcatttcacatgcaagacacgactgataacaaaacgctgaaagaaggaacagactatacattaacaaaaaaacccggaaatcaaggctttacaatagcattgatcggggattatgcagaaacaaacagtcagtttaagatcacgtataagacaaaattcaacgctgacttttcaaacgaacccattaagaatacggctgagtcgacatggacggataaaaacggcggcaaacgcacaaataaggaatcgagcggcttcacaccgaacaatcagacgtcccataatggattcaaaaacggctcatacaacgccgtttcaaaagaaatcacatggaaagtcggcattaattacaatggcgaaccttcaaagaatccttatataaaagatacgatcacagatggtcagcaatttttgcatgggtcggttgctgttaaaacgtataccatcagcaaaaacggctccatcactgaaggagaggcgctggattcttcaaaatatgaaatagaggagccgtcagacggcaacaaaaatacgttaaccgtacgtctcaaaacagatgacgctgtaccatacctgattgaatttaaaacgtcattaaaaggccaggtcattaaacagagtcaatacacaaacaaagcagagtactttaataatgaccacgcagaccgaacgctgacgggttcagtttccatcgcaaacggaggaaacctgatttctaaaggcggcaaacagaacggaaacgatatcgattggagcatcaatgtcaatgccagccaatcgacactggatgacgtaaaagtcaaagacaccccggatgagaatcaaataatagatgaagattcttttaaagtatatcaagcaaaatataatgagaacggcgttatgaaagacagcagcggaaaccttattccgggtgatgtgaagcttgaaaaagataaggactataaactagatataaaaactgacaatgccaccggcgaacaatcatttgtccttacctttacaggcagctataaacaaatcgaccgcgcgtatgtcatacaatatcgttctctcattaatatttccggcagcagcggtcaggtcagcaacaaagtgtcgatatcagggacaaatgttgaggagcagacccaagagaacaacagctcagtgtttgtcgccatttcaagcggcggcggctcaggatcaggagagaagggaagcctgacgatatctaaaacaggatcagacggaacatctctttcaggagccggctttcaattatggtctaaagacggcaagcagctgctgcgtacgggcacaacagacgatgccggtaaacttacgtttgggaatatccgttacggaacctatgtactgaaagaaataaaagctccggacggctacaccatcagcgatgcttatgtaaacggggtctccgttacgattgacggcaaatcctccgctgcaggagcactctataaagtcataaatcaaaaaaataaggtgacgcttatcaaaaaagacgaaaacaacaagcctttggccggtgctgtatttaagcttgagaaaaaatcaagcgacggcacctatactctgataaaaaataatattgaaagcgataaaaatgggaaagttgagatcaacggtttgcccgccggatactatcggctgatggagacgaaagccccatcagggtttatcgtaaacacaaaagccattcacttctcaatcgcaaagaacgaaaagaatcaagtacctgatgttgaattgggatcaatggtgaattatcaaggaaaagccgcattaacgaagaaagatgcagacggcgggaatcttgaaggcgcagttttcaaaatcatcgacagtgatggaaaaacggttcagaaagatctggtttcagataaggatggaaaaatagaaacatccggccttgcacccggtcattacgccttcatcgaaacgaaagcgcccaacggatatgtgttaaatacggagaaagtggagtttaccatctcagaaacagcggaaggaaagccggagtcaactgacgcaggaacggccgtcaactataaaggctctgtccggctgacgaaggaagatgcggaaggccgaaaccttgaaggcgcagtcttcaaaatcgtcgacagtgatggaaaaacggttaaagaagatctggtttcagataaggacggaaaagtagaaacatccggccttgcacccggtcattacgccttcatcgaaacgaaagcgcccaacggttatgtgttaaatacggagaaagtggagtttaccatctcagaatcggcggaaggaaagccggagtcaactgacgcaggaacggccgtcaactataaaggctctgtccggctgacgaaggtagatgcggaaggcaagaagcttgaaggtgcagtcttcaaaatcgtcgacagtgatggaaaaacggttaaagaagatctggtttcagataaggacggaaaagtagaaacatccggtcttgcaccgggtcattacgccttcatcgaaacgaaagcacccgacggttatgtgttaaatacggagaaaaaagagtttaccatctcagaaacagcggaaggaaagccggagtcaactgacgcaggaacggccgtcaactataaaggctctgtccagctgatcaagaaggatcaagacggaaacgttttagacggtgcagtatttaaaatcattgacagtgatggaaaaaccgtaagagacgatctgatgacaaaagaaggcggcaaaattgacgccggcggtttggcgcccggaaactatcaatttgttgaaacaaaagcgccggatggttatctgctgtcaacaacccctgtgccgtttacgattaaggctgagaacagcggaaaaccgaatcaggctgccctgactgcagttaacatcaagaacagcgttgttctcacaaaattggatcaaggtgacaaacggaaagtcctgcaaggtgcgaagtttaatctgacagatgcaaacggcaaagtactgacagagggtctgacgacagatgagcacggacaaattattgtacggggactgaaagcgggcgaatatcaatttatcgaaacaaaagcgcctgaactttacagtttggatcaaacgccaatatcattcaagatcacaaataccgacataaaaccagtcgaaatcagtgcggagaatacactgacgcctggtgatgtcacactgacaaaagtggatcatgacgataaaaataaggtgctggaaggtgctgaattcaagatcacggattctgccggacatccggtaaacaccggcggcagcaaagaacggccggcggtatggaagacggatcaaaagggccggtttacggtgaaaggattagcgcccgggcagtatcgatttatcgaaacaaaagcgcctgacggctatcagctgaacgaaaaaccaattgaattcacaattgaaaaaggacagttaaaagccgttgaggtcgtcgtttctaataagaaattaaaaaatcccgcacctgggaaagacacaccgaatcatcaaacgaatcaaggcgggcatcatcctgataccaatggtaaaaccaatcactcggatacaggcaaaaacctgccgaaaaccggtgatacggacggtatgatgccggtcacggccggtattctgctgctattagccggcggagccgcggctgttgtatcaagaaagaagaaagcaaggaatagatagacgttatcgcacctgatcatgtaagaatcgatcaggtgcttttttaaaaagagaatcatttctcaccaaatattcaccgcatgacgtacaagaaaggaattttcttcatggttaaaaaaatgatcattgccgttcttattttgtccgggctgcttctcatttcctctcctctcatgaaaggctgtttgatcgcgtacctcagtaaaagccaaattgaatcggaattgaccgcagaacaagcgcggaaaaataacatgaaaaaagcggactatgattttgaatccattcatccgcccggtttcagggaaacagttcagtcaagttttaatcgcaaaccaaaaccgataatcggacggataaccatcagcagcatcgatttagaccttccgattttaaaaggcacaaccaatgaaaacctgctgatcggcgcggcaactatgcgtccggatcagaaaatgggcgagggaaactacccgttggcaggccaccatctgaagcaggagaacctattgttcggccctcttttacacataaaaaaaggcgcgcaaatcgtgatgaccgactttagaaaagactatatttattctgtaacatcaaaaaccatgatttcagaaatagaagcaaacgcaattcaggagacaaaagataaagagattacattaatcacatgcgacaaagcggtaagaaccgaaggacgcctggccgtcaaagggaaattgattgatatttccggtcattcaaatgtatctcggccatcatagagaaacactttttcaactgaatatacgtccgctgttaaacatcccgagactggcttctgtcagtctttttttgcgcagcgattataaaaagttcatccttcttatctctcttgagggaaattataccagactgcactttttgaaagaaatgacaagagaaaaagatcacgaaaattctaaaaagtgagaaacaaagatttaaaaagtggtatgattttaggaggaaaggacggctggtgctgtgttggaagcgaagcggttttatgtctctctgcaaatgaaaatcgccggattaattgcggctttattaatacttgtcatcggaacgctcacagttatatttgcctttcagcaattaaaggaaggccagaagcaggctgaacagctggcggtgcaaacggcaaaaaccatttcatacatgcctcctgtaaaagaggcgttccggcttgcggatcaagaggcttttacaaagttagatgtcattgaacaaatgaaagaacaggcaggcgcgcacgccgtctacatcactgatcaaaaagggcatgttgcatttcattcggcccgaagcagtattccgaaagaaaatcaaaatctgcaaaataaaaccgtcatgttcggcgggtcaccggtttccgacggaatgaaggctgtccgggggagcgccccggttattttggaggaaaaaaatcataacgaagtcgtcggaacggtgacagtcgagtttttacaagatgagatagaaaaagatatgaaagcgcatctgcggcatttaggctattttgcatgtttggtgtttcttatcggcatcgggggagcggcggcgctcgcaaaaagcatccgtaaagatacactcggccttgaaccgcatgaaattgcagcgctgtacagggagcgcaatgcgatgctccttgcgattaaagaagggattatcgccgtaaacaaagaaggcgcggtaaccatgatgaatttatctgcggctgatatgctgaatcttccggaaccgatgatcggaaggcatataaaagaaatcatgccgggcgcaaatctcatgccggtgttggcagggggagaattaccgccgaacgtggaggtgcgtgccggagataaagtatttatcttaaacgtgaaagaaatgaagcagaccggacaagtatacggagcggtgatcagcttccgcgaaaaaacggagctcaagaaactcattaacaagctgactgaaatgaaaaaatactcagaggatcttcgggcgcaaacgcatgaattctcgaataagctttacgcgatcctcggtctgttagagctgggagaatataatgaagccattgaactgataaaagaagagtacgccatccagaatgaacagcacgaaatcctctttcaaaacattcattcacagcgggttcaggccatactattaggaaaaatgggaaaggcgtctgagaagaaagtgaagctttcaatagatgaaaacagctttttagaatcgctgccggagcatgtgggttcatctcagctcattacgatcatcggaaatcttattgataacgctttcgaagccgtcgccgaaaaagagaaaaaagaggtcgccttttttatgaccgatatcggcagggatatcgtcatcgaagtggcggactcaggagacggcgtgcctcaggaaaaaacagaaacgatatttgaaaagggctactcttcaaaggggacgaggagaggatacggcttagccaatctgaaagaagccgtcagtgaattgcagggatcgatagagatttcgcagcaaaagagcggcggtgccgtatttacggtgtttataccgaaagaaacgccaaagggggaatctttgtgattaacatcgcgattgcagaggacgactttcgaatagcgcaaattcacgaaaaatttatcgaacatcttgatggattcaatgtcatcggtaaagcaatcaatgccaaagacaccatatcgctgcttgagaaacggcagcctgatctgctgcttttggatatttatatgcctgatgagctggggacagatctgcttccccttatccgcggccgttttccttccgttgatatcatcattattacggcttctgccgaaacaagactgctgcaggaagcgctcaggtcaggcgtttcccactatgtcataaagccggtgtcggcacataaatttacagaagtgcttttgcagtaccgggaaaaaagagaatggctgcactcacagccggagctgagccagtccgttatcgacatgtttttcggaagcggtcagaaagaacaaaaacagctcaatgatctgccgaccgggattaattcgattacacttcaaaaaatcaaaaacgcgctcagggaagcccaaaaagggatgacggccgaagaactgggcgaaaaaatgggcgcctccagaacaacggcgcggcgctacgccgagtttctcgtttctcaggaagaagcgctcgctgaattagagtacggcattatcggcaggccggaacggaaatattatttagcacatgaataagggatgggagaaatgaagcggttgggagtgcttcttgtcatgctggcggcgctggtttcttttgacggacggcagatggcgggcatccgttcagccgaagggccggttgaaattgtcgtcccggcggcgcctcaagggggctgggacgtaacggcaaaagctttgcaatcggttatagagcggaagcaaatattaggccgtcccgtaaagatcgtctataaacccggcggaggcggagacagcggctggaaatatgtaaacgaacgaaaaacggatgtcatcagtatgaattcaagcctgctgttaagcaatgaaattttgggacaaagccggctgaaggcagctgattttacgcctttggccattatcgcaaaagagtggcagaccgtcgctcttccgaaggattcaaagataaaaagcggaaagcggctgctcggcgatattaaagcacatccgggcggcataaaaatcggatttgcgcccggcctcggaaatgatgaccagctctcctttgcgagagcggcggaaatggccggaatttctccgtttgatatccgcttttttcaatacgggagcagcaatgaagtcattgaagctcttatcagccacgagatagacgccgcctcaatgaccatttcagaagcgagagacgcctatcggaaagggaaaatcacattggcggccgttacgtcggacaaaaggctctccggcttcagcgatgtgccgacatggaaagagcagggggtgccgtttgtctttgcgcactggagaggcatcatggggccgaaagacatgaccgaaggcgagatcgcctattgggatcaggctttgaaacagattacctcatccgcggagtggaagcaaatgttgaaaaaacgggattgggagagcttttataaaaacagcagcggcgcaaaacgctttttagaagagcagaccgagttttataaagagatgatgagcagcgaaaaataagccttccgcatatttgcgggaggctttttatttataaatgaacaaaatgaacgaaaaggttataaaaaattaaaaatctttaaaatccaaaatatttacttcaatatccaattctcataagatagcaaaaaggcggataaaggggatcgggcctttaaaatgtaagcgtattcatgataagggggacatactgtgttagcaatcttaggctttcttatgatgcttgtttttatggtgctgattatgacaaaacggctttcagtgttaacggcgctcgtattaacgccgatcgtgtttgcgctgtttgccgggttttcttttaaccgggtcggcgagatgatgatttccgggattgaacaggtggcgccgattgcagtcatgattatgtttgcgattctttatttcggcattatgattgataccggtttatttgatccgatggtgtcgcgtattttaaagctggttaaaggcgacccgctcaaaattgtagtcggaacagccgttttaaccatgcttgtcgcactggacggagacggctcgacgacgtatatgattacgacaagcgcaatgctgcctttgtatatcatgctcggaatccgtccgattattttagcgggaatcgccggtgtcggcatgggtatcatgaacacgataccatggggcggcgcgacgccgcgtgcggcgagtgcgctcggcgttgacccggcagagctgacggggccgatgctgcctgtcattgccagcggaatggtgtgtatgattgtggtcgcttatgtactcggaaggatggaaaggaaacggctcggggtgatcgaattaaagcagccgtcccatacaaatgaaacggctgcggctgaggaagatgaatggaggcggccgaaactgtggtggttcaatttactgttaacgctttctttagtgggatttttagtgtcaggaaaagtgaatttaaccgtgctgttcatcattgcgttttgtatcgcgctgattgtcaactatccgaagcttaacgatcaaagggagcgtatttcagcccattcgagcaatgtgcttgcgatcggttcgatgatttttgccgcaggcgtgtttaccggaattttaacggggacgaagatggttgatgagatggccatttccctcgtatcgcttattccggaacagatggggggatttattccggcaattgttgccttaacgagcggtatttttacatttctgatgcctaatgacgcctatttttacggcgtgctgcccattttatccgagaccgccgtggcgtacggtgtagataaggtggaaatcgcccgcgcttcgatcatcggccagccgattcatatgttaagcccgctcgtgccgtcgacgcatttattagtcgggcttgccggggtcaccattgatgaacaccagaaatttgccatgaaatgggcggttcttgccgttatcgtcatgacggcctttgcgctcatcatcggcgcaatcacgattttttaacataaaacacccggttcgtcgcacactaaaggcatcagaggaggtgccatgatgagtgatccgtttatgccgcttttttcagtgagaagcggggccggttttaaagcggcggacggcgtttacggactgaccgtgcagattgcgaatgtttactttatcgaaaatccctcagctccgcgggaaatcattctggttgacgctggaatgcctcaatcggcggagatgataacagaagaaatgaaacgccggttcaaagaggggtatcagctgaaggcggtcattttgacacacggtcattttgatcatgtcggtgcgattgaagagctgcttgagctttgggatgtgccggtttacattcatgaaaaggagctcccgtacgtcacggggaaagcggattatccgcctgccaggcccgatgtgaaaaaggggcttgtcgcaaagctgtcaccgctgtttccgcgccatacgatccgcattccgtccgttcaggcactgccttcagacggtaccgttccgtttcttgaagaatggaaatgggtgcatacgcccggccacacacccggccatatttcattattccgggataaagaccgcgttctgcttgccggtgatgccgtgatcactgttgaacaggaatcgcttgcggacgttgtcattcaaaagcaagagcttcacgggccgcccgcttattttacagcggatacgcagacggcggccgcatccgttcagaaactggccgaactggagccggaagcgcttttgacgggtcacggaattccgatgacgggaaaaaactaccgtgaggatttgcttacactggctgaaaaactgcattccgttttgtaaaacacctgcgaacatcacaggtgttttttctttgcagtttccagtatgatacaaaaaaaccattgtgttcactcctaaaaacgatacaatgggaaacagatgtaaattgaaggagagagttttttgaaacatacggaaatactttgggatgaggcgaaggattttattgatgtctgctatcaggaactcggaatggaatcgcaaatcaacgcgcgtctgcacgcgataaaagatgagatagatcggacgggaagttacgtccatacggcggaagagcttgaacacggggcgaaaatggcgtggcgcaacagcaaccgctgtatcgggcgtctgttctggcaatcgctgaacgtcattgaccggcgcggtgtgaacacgaaagaagaggttcgcgacgcattatttgaacatatcaaaatcgccacgaacggcggaaaaattaaaccgacgattacgattttccctcctgagaagaatggggaaaaacaagtggagatctggaatcaccagctcatccgctatgcgggatatgagactgaaaaaggaagagtcggtgatccggcatcatatgagctgacggctgtctgcgaaaaactcggctggcgcgggaagcggaccgattttgatattctgccgctgcttttccggatgaaaggggacgggcagccggtctggtatgacctgcctcagacgctcgtgaaagaagtgccgatcacccatccggatattgaagagtttgccgatttaaatctcagatggtacggggttccgattatcgccgatatgaggcttgaaatcggcgggctgtcgtacaacgcggcgccttttaacggatggtatatgggaaccgaaatcggcgcaaggaaccttgctgacgaaaaacggtatgatatgctcaaaaaagccgctgcggtcatggggatttccgccagcctgaataccgacctgtggaaggatcaggtgctggtggaactgaataaggcagtgctctattcatacaaaaaacacggtgtcagcattgtcgatcaccatacggcggcgaatcaatttaaacgctttgaagaacaggaacaagacgcgggaagaaagctgacgggcgactggacctggctgattccgccgatctcgccggcttccacccacattttccataaatcatatgacaatacgattgtgaagccgaattattattatcaggacaagccttatcagtaactgatggtaaaagtgcggtaccctttcagacggtgtgattcttcgatggttatgccggtgacatttgagaaggggctgccttttctgactgcttcggcaaattgttttaacgactcttcaggaccttcggcaaggatttccacccggccgtcatcacggttttttacccagccggctaccttatgtctgtcggcttccatctggacgaagtagcgaaaacctacgccctgaacccggccgtctgcaatcatatgatattgaagcatggaaaaaccacctttttcttactatgataaaggaaagatatgagatttcgcaaaggatgtgaacgaggtgacgcaagactattctgtcttatctatcaatctcggaaagcccgcaattcatgaatttgccggcagacaaatcaattccggcatcataaagcggcccgcagattctcccgtcatgctgtataaaacccattttgacggggacgggcaagccgacttgaagcatcacggaggccccgataaagcggtgtgcgtgtatcccgccgagcattattcatattgggaaacaacgctcgcgagaaaacttcccgccgccgcgttcggggagaatgtaacggtcaaaggactggccgaacaagacgtgtggatcggagacgtctttcagctgggggaagccgtcgttcaagtaagccagccgcgccagccctgcgtcaaactcgcgctcaaatatggcatcaaagatatggtgctccgtgtacagcagacgggatttaccggcttttatttcagggtgcttgaagaaggatatgtcgatccgcgtcccgtcctcaagcgtctgtcgagaggaaaagaaagcatttccgtctggtatgcgaatgaagtgaaatatcgtgattccggcaatctgtcagcgattgaagaaatactgcgggaagaagcgctgtcagaaagctggagggagtccttccttaaaaaaagagacaggctcactaatgtatagaaaaaagccgtgctgcactgacagcacggctgatttacgttatgcttgtttttttgtttccagcagattggcaaggaagtactttttgaagctttgaagctttcttccttcatagtgggtaattccttttttctttaactcttctacataccagcctttactgccataatgcatgtcagaaaactcctttctccgttctcccgttgaggagagtttcttcagtttttgccaaacttttggcattgtaacatctataaaaagacgctgaaaagggataacgcaaaaactgagacttcagattcagagatgtaaagctttcttacatatatatgtaaagggcggtcttttcatgcttaatggccggttaattttaacagcaccgttccgagtgtcatgattccgaaaacgacgccgaaataaaccagcatccccttctttttcttcactccgtaaacggtaagaatgatgctttcaataaagaaaataaacccgaagataataaaccacatgttgaaaaatggctcctttcacagacatatgtccagtgtagcacaactcttataacggagcataaaaaagccgggcactgtatcagtgtccggcaagtttgacgagaagctgggccaaatgctgtttttcattgtcatccgcaatgtcccacagttcttgtaagagtttttcttccgcattgcggggctcctcgtgtttggcgagatagtccccgaggatggcggcgcttttgatgattttgctgtcatccagacccagtttttttccggcggaaattttctgatgaaggtacgccttaaattcctcgaaatcctctaaaatctgctgtttcgttacgccgtgcatggcgtgtatttcgttttcgattttgattttttctttatcttttttcatgcgtctccctccttcgggttagttgttgtatacctgtttggaagggagatgaaacattacaatgcagttaaaataatcggtttgtcttttgtgatcacgatggtgtgttccacttgggcgacaaggcttttatccggcgttttaaacgtccagccgtctcccgcttcaacaatcgtttccgctttcgtggaaataaacggctcaagcgcgatcacggttccgtttttaaacagcgcgttatcaaacggatcatagtaattcatgatgtggttcggcgcttcatggaggtttctgccgattccgtggcccgtcagcgttttaataacggtaaatccattggagcgggcttcatgatagacggctctgccgatctggttttggcgtttgccggcttttgcctgatccaatcctttctgaaatgcggatgctgcgcaattacaaagcttttgcagacgttcatcgccttctccgagcacaaatgaaattcccgtatcggaataaaaaccgccgaactccgccgaaatatcgatatttacaagatctccggcttttaagattttagaggcgctcgggatgccgtgagcgacttcgtcatttacgctgatgcatgtcacgcccgggaaatcgtattccttctccggagcggaagcggctccgtgctcgtcaagcaccgcctttccgatcaggtcaagatctttcgtgctcatgccgggctcggcttttttcttcatttcttcacgcgccagcgcgacgattctgccgatttttttaaggccttctaattcttgatcgttcgttacaatcattgtcattcccgctttctatttttaatcatctgattcaagcttaccacaactggtttataaatagaaaaccaacaagccttatgtgaataaatgaaggaaaattggtatagatcactagataacttatgtggtatatttaagaaaaaagaagggggatgggtaaaatgcttcaatttttgcaaaaactcggaaaatcatttatgcttccgattgccgttctgcccgccgttggtattattttggccattggcagagaggacttattaaatattccgttcatttacgcggcggggaccgcggtatttgatcatctgccgctgattttcgcgatcggaatcgcgatcgggatttcgaaagacagcaacggggccgccgctctgtcgggagcaatttcttatatcatgctggacgcggctgtaaaatcaatcaattcgacaaataatatggccgttttcggagggataatcgcggggttaattgcgggatacacgtataatcgctttaaggatacgaagctgcccgaatatctcgggtttttcagcgggcgcaggctcgttccgattgtaacggcgctgattaccattattttggcggggatcttcggatttgtgtggccgccgattcagtcggtgattacgtctttcggggaatggatgatcgggcttggcggaatcggcgccgggatttacgggatttttaaccggcttttgattccattcggtcttcatcatgtgctgaataatattttttggttccagtttggcgattttcacggaaaaacgggagatctggcccgcttctttgcgaaagatccgacggcgggaacttatatgacgggattcttcccgattatgatgttcgggcttccggccgcatgtctggcaatgattgccgcggctaagccaagtaagcgcaaagcgacggccggaatgatgatcggtctcgcgctgacggcatttattaccggaattacagagccgattgaatttgcatttatgtttttatcaccgcttttatacggggttcatgctatattaaccgggttctctttatttatcgtgaatgttctcggaatcaggtcaggtttttcattctcggcgggggcgatcgattatctcctcagctacggcattgccgaaaaaccgcttttgctgctcgttgtcgggctttgttatgcagtgatctattttgtcgtcttctatatgctcatcaaaacgttaaacttgaaaacgccgggacgggaagatgatgaggaagaggaagaagtgcttagtgaagatacggccggttccgtcgaagaacatgccatgctcaaggggctcggcggcaggcaaaacctcgaaacgattgatcactgtgcgacccgcctcaggctgactgtgcaggatacgtctctcattaatgaagcggcgcttaaaaaagcgggagcaaaaggggttatcaaaacggggaataaaacggcacaggtcattatcgggccgaacgtcgaatttgtcgcggaagagctgagagaagccgtccgccttgacgatcagaagcagacttgataaatccggatcacctatgtgatccggattttttttgaacatatatcaagtttcacataatgtacaaaaaacaacgttttcttctatgttaagattcatgtagaacaagtatggagatgatgtaaggtgacatggattgcagttgtttcaattgttgtcataagcctgattaagattgtgctgacatgccttcctaccggagcggtggaatggatcctccgcaagtttgaaacccattcaaagctcagtgacgcgtccgctgccgtttccctcggcggaaaacgtctggaaggcgaagacaaacgccgggtgattgatgattttaacgaagccgtgtttatcgaacggcattatatatacccaggggatgaagagcgttatcttcatccgcaaaacggagctgatccgcttgtcattaagacgagaaaagggaaaaaagatgtgacggtgtttgtatacagctacgaagatcatgtagatgtcgtcaaacagcagaaaaagaaagtcgtcgcttattcagttctttccgacagcctgcaaaagcgctctatggccgccgccgggagctgaacataaaaaagccagatcattgatatgatctggcttttgtttattctttttgatcatctgctgaggaatcttcacgcttcgtataatcgaattgtgaaggatccactttcttaaagcctttcggctgatagaaacgaagcagatcgccgttgatgatcttatcagacatttcaagctcagtcttgacgagagagtcttcttttttgtcgacttctgaatcatctaaaagtcttccggttttcgtatcgtaatacttgccggacactttcgtatagttcggcgagatgaagtctccgttacggaacggaatgacttctctgtgctctttcgataagatatctgaacctgacatgagataatctttcgtatcgacgccgagcagatgaagaacggtcggcgcgacatcgacttcaccggcaaatttatgattgcggccgcctttcacgccgggagcgtggataaagagcggcacccgctgaagctgggcattgtcgtattcagtgatctcatctttgccgagcactttcgccatcgctttattatggttttcggagatgccgtagtggtctccgtacatcacgataatcgacttatcgtacaggccgtcttttttcaggtcatgaaagaactgttcaattgattcatccagatagttcgcggactggaagtaattattaacgactgaatcgccaaagtctcccgcagggaagtccgtgtcttctttatccattccgaacgggaagtggttggacagcgtaatgaacttcgtatagaacggctgcggcaggctctttaagagcggcatggattctttgaaatacggtttatctttcatgccgtagtttttcgtgttttcttcgctcatgtcataataagcggaatcgaaaaacttatcgatgccttccgctttgtacatttcgttacggttccagaaagtctgcgtatttccgtggaaagcggcagacgtgtactttttgccttttaagatcgcaggaacggactgcagcgtgttttgcgctttattgacgaaaaccgaaccttgcgaaagcgggtacagagagttctccatcataaattccgcatcagatgttttaccttgtcccgtttggtggaaaaagttatcaaagtagaatgtttgattatcgtgcgccagcttatttaaaaacggcgtcacttccttgccgttaattttatagtcaatgataaaggattgcagagactctaatgagacgtagatgacgttttttccttcggcttttccgaagtagacgttattcggcacgtcatagttggccttcatatagttttccacatccgttacatcgcttgaatcggcaagcgcgcgctggctgtttgatttcacattctgcacggcatcgtaaatcgtaaagttgtacgtgcccaagtatttcaccagatagtttcggtcaaatgagcgtgtcaaaagctcaggacggtcggattccgcgacggcgaggttgatcaggaacataagcacggcggaagccaaaacgattctgaatgatttcttcgccggtttttcagccggttttctcatcttaagggccaaaataatcaaaatgacggtatccaggaagtagaaggcgtctgtccatctcattaacgagaacgcgctgtctccgagctggccgccgtttgtctttgcctgcatcatgaccgggatggtaatgaaatcattaaagaatctataatagacgatgtttgcaaaaagcaaaaaagacaataaaaaatgaatcacaataatggctgtctgctgtaattttttcttgaaaagaagcccaaatccaagaaagaacaagctggagctcagcggattcacaaaaagcaatattttctggatcgtgttgtctatgccgaggttaaagtttaaaatataagcgacatatgttttcacccacaataacacgaccgctatcaagaagaaggcaagtcctctttcttttataaatgttttcattgttacactccttttttccgatcacggtttaaacggaacgatagaaaaaacgaacgtaatcaatataccatgaaaccagcaaatagaaaaggtggaaaaggctcatcggaaaaagggcgaaaaacgctgtcgcaacggcggttaatctgttgaatgacagctttaaaacatataaatggcacaaactgggatttgtgtttccgtatgatcatacccggttctattgaaaaaagaggtgaacagtgatggatattgcccatatcgtggctgaagataaaatcaagcgcgccattaaggacggagagttcgccggcatcaaaggaatgggaaagcccctgccgaaagacgatgccgcacatcttccggagtcgctcagaatgggctaccgcatattaaaaaacgccgggatcgccgaggatgagggcgcgctgaagaaagagctgatgacgctcgattatttgatcgccaagtgccgcaatgaacaggagcgggatcacttgcggaacaaacggacggaaaaacaagtcagactcgacaaactgacggaggagaaagccatgttctcaaaacccgcatcttctcattataaggagaaagtgtacagacggctgggccgcccgtaagccggctctttagatttttttctgaaaaggaatgtgctccataaggcgcgggtaggaaatgtggagcaggccgtttacgcactgcgcctgtaacaggtggggctcagccggttcaggaagctcaatcgtctcatcgatttccccgtaataccggttttggcagacgcccatgttctttggaaaaaggggtgtgatgtttcctctgatatgcagccgtgttcttgacagcagcctcaatgtcaattcttcttcgtaaacgccgggcatttccacaatgacgaatgtgtgctgttcatcctgataaatatcataagtcagggtgtttttttgtaaggagaaaaaatcttcgggagatttccgtttcaggacattggtccaaaagtcgctgggcttgtgctcgttcgtaatctcaagccactttctcattttttcgatatccacttcggcagaacctccctatatttgatttgcgatcggcattgacgggttggcgatctgatcctgatcgctcacgtcagggtcaagatggcccgaattcaaacatccggcggccggcgaaaaatcccctaaagaaaagttcgcgccgacaaatttgctgttggcggtgtggctgttttgtacggtctgaccgatatcgacgtttccgttttgcgttgctccgtttacttttatattgacgacgttaatttggtaaggcattcataaaaacccctttaatctataatgggcggcaccggcgtaatatttgcggtatctgcggttccgatggctgtctggtcgttgacatcaggatcatttaacaagttctccatcatcgattctataggtgacgtatcgccgaatgaagagttcagtccttgtgatttgttatttgtggtgggactgttgtatgccgcttccccaatcgtaatagatccgttgccagaaatactgttaatcttcaaatagtacaggttgataacagtggatggcatctcttcacacctctttaacttagttgtacagtactgtatgctttttgtgctcctgttgtgaattccgcccggacatgttcccgataaaacaagaagtcaaggcccggttccggcggggctttttttgtttcagggtctttcgcagtatatttgtgatgaaagcgctataaaaatagattgacgacatgtatatacatcattacaatagagtcataaacatgtatatacaagtttgtaagacaaaatgaaaacggttacggaggggttggcatgggtgagtttaaccgggctgcgcggcagatcgctgaagctgtcggcggaatcgaaaatattgaggcggcgactcattgtgtgacgcgtttgcggtttgcattaatagatgaaaccaaagtaaaccaaaaaatgcttgatgcaatagacattgtcaaaggatcttttgcggtaaacgggcagtttcaagtcgtgatcgggcaggggacggtcaacaaagtatatgcggaattagtgaaggaaacggggatgggtgaagcgtccaaggatgacgtgaagaaggcggcagcgcaaaaaatgaatcctttacagcgtgctgtgaaaacgcttgcggacatctttattccgatcttgccggcgatcgtcacggccgggcttttaatgggtctgaacaacatcttaacggcggaaggcattttctacagcgccaaatcgattgtccaagtgtatccgcaatgggcggatctcgccaatatgattaatctgatcgcggggacggccttcgcttttctgccggctttaatcggctggtcggcagtgaagcggttcggaggaagcccgctcttgggtatcgtgctagggctgatgctggtgcatcctgatctgttaaacgcatggggctacggggctgccgagcagagcggcgatattccggtgtggaacctgttcggccttgaggtgcagaaagtcgggtatcaaggtcaggtgctcccaattctgctggcgtcttatttacttgccaggcttgagctctttttgacgaaacggacgccggagggcattcagctgttagtcgtcgcgccggtgacgcttttggtcatcggttttctatcctttgtcatcatcggtccgatcacctttgcgatcggtaacgcgctgacggcgggattgattgccgttttcggccaattctccgccatcggaggcctgctgtacggagggctgtattcggcgcttgtgatcacggggatgcaccatacgtttctcgcggtcgatcttcaattaatcggatcaaagctcggcggcacatttttatggccgatgctcgcattgtcaaatatcgctcaagggtcggcagctttggccatgatgttgattacaaaagataaaaaacagcgggggctttcactgacggccggcatttccgcatatttgggcattaccgaaccggcgattttcggcgtgaatctgcgttacaaatttccgtttgtgatcgccatgatcagctcgggaatcgcggggatgttcatctccgtcaaaggcgttctcgcaagctcggtcggagtcggcggcgtgccggggatcttctccattatgagtcagtactggggtccgtttgcgatcggaatgctgatcgtactgattctcccgtttgcgggaacatacgggtatgcgaggctgaaacggcaaaaatagaaaacctgctgggcgccttctatcaggctgtcccttttccctttcaattcaaaacattacaggcggtgaagaaaaatgaaaacagacagcacaccatggtggaaaaaggcagcggtatatcaaatttatccgaagagctttaatgatacgacgggaaacgggatcggtgatctgaacggtattatcgagaagcttgattatttgcagaagcttttaattgatgtcatttggcttacgccgatttacgattcgccgcagaatgacaacggttatgacattcgcgattattgcaccatttatgaagaatacggaacgatggaggattttgaacgccttatcgatgaagcgcacaaaagaggaatcaaggtcgtcatggatcttgtcgtaaaccatacatcagtcgagcatcggtggttcaaagaagcggtctcgtcacccgacagtccgtatcgggatttttacatttggaaagacggaaaggaagacggccgggcgccgaacaactgggaatcaaaattcggcggttccgcttgggagctcgacccggcgtcaggccagcactacctgcatttatttgatgtgtcgcaggccgatttgaactgggaaaatgaagagatgagaaaacaggtttacgacatgatgcatttttggttccggaaagggatcgacggcttccggctggatgtgatcaacctcatttctaaagaccaatcgtttcctgatgccaaagatgggcgtgacgggcgcccttattatacggacgggccgcgcgtgcacgaatttctccatgagatgaaccgggaagtgttttcgaaatatgacagtatgacggtcggtgaaatgtcctcgacaacggctgaccactgcatccggtacacaaaccctgagaataaagaactcgatatgacttttaactttcatcatttaaaagtggattatccgaatggtgaaaaatgggcgctcgctccgtttgattttctgaagctgaaacggattttagcgttttggcagacggagatgcaaaaaggcggaggctggaacgcattattctggtgcaaccatgaccagccgcgggccgtatccagatacggagacgacggcgtataccggacgaaatcagccaaaatgctggcggcggccattcatatgatgcagggcacgccttacatttatcaaggtgaagagatcggcatgggcaattcgaaattcgatgacatcggctcataccgcgatgtcgaatcattgaacatttacaaaaagatgaaggaagaaggcgtgcccgaaaaagacattatcgccattttaaaagagaaatcaagagacaatgcaagaacccccattcagtggaacagcgggccgcacggcggtttcacgacgggaacgccttggattccggcggcggatgattatcgggacgttaacgcggaagcggctttgcgggacccggattcaattttctatcattatcagaagctcatcaagctcagaaaagaatatgacatcgtgacggaaggaacgtttgagctgcttgctgaagacgatccggcggttctggcgtacgtcagacacggcaaggatgaaaaactgctgtgcatcaacaacttctacgggaaagaagcggactttacggttccgcttaaagacacggacggctggcggtttacggtgctgctgacgaatgatgaaccgagggatgggcggccggaacgattgacgctccgtccgtatgaatcgatcgtttatcatctgacaaaagcgtgatacactaatctgggtggtcaaatgaaagtgaataaatacatcacaatctataaagatatggtgcggcagatcgaaagcggccagcggaaggctgaagacgttcttccgtctgaaaatgatttgtgcgatcaatacggcacatcacgagaaaccgtccgcaaagcgctcaatatgctggcgcaaaacggctacatccagaaaatcaaaggcaaaggctccgtcatattagacagagaaaaaatgcgttttcccgtctcaggcctgatcagcttcaaagagctttcggaaacgctcggaaaagagacgagaacgacggttcaccgtctcgggctgatcctgcctccctcagaagccgcaaaagagcttggtacagaagcggatgaaaaggtgtgggaagtcgtcagatcaagacggattgacggagaacatattattttggacaaggattactttgtgaaaaaacatgtgcctctattgacgaaggcgatttgtgaagattcgatctatgagtatctcgaaggagagctcggcttgtccatcagctacgcgcaaaaggaaattgtcgtggagccggcgggggaagaggaccggaagtatttggatctcggcggattcagccatatggcggtcgtgaaaaaccgcgtctttttggaggataccagcctctttcagtacacggaaagccggcacaggctcgataaattccgtttcgtcgactttgcgagaagagaaaaataaaaacggactgccgcggcagcccgtttttttgtcagtatcaaaatgaatactatccaacaaaaatgtgcgtactggtactttcaaaaataatggctacaatagtacataacgattgaaaaggagagatcatgaatgtcagataaaaaacagcagatcatcgaagcgtatcaattcagacacgccacaaaggaatttgatcctgagaaaaaaatttcagaaagcgattttgaattcattttagaaacgggaagattatccccaagctcactcggtttggagccttggaaatttgtcgtcgttcaaaatccggagcttcgtgaaaaactccgcgagttcacctggggcgcgcaaaagcagctgccgaccgcaagccatttcgtacttctgcttgcccggacggcaaaggatatccgttttgacgccgactatgtcaaaaaccacttgcgggaagtcaaaaaaatgccggaagatatgtatgaaggctatatcagcaaaacggaagacttccagaaaaatgatttcaatctgctagaatcagatcgcgcgctgtttgactgggcatccaaacagacttacatcgccctcggcaatatgatgacagccgctgcgcagatcggaatcgactcctgccctgtagaaggcttcaactacaaagaaattcaccggattcttgaagaagaagggcttctggaaaacggaagtttcgacatctctgttatggccgcattcggctaccgtgtcagagaaccgcgcccgaaaacaagatctgcctcaaaagacgttgtaaagtgggtataagataaaaaaggctgccgggcgtgtcccggcagcttttaacgtttatttggttttgctaaaaaacaggcggtgatccaggacgtaacgggaatgatgatgccgatcccgattccggcacaaagaatggtaacggcttccgcactgaatacttttgagttcactattttttcagctgagtatgataagtctttaaaccagataattaaagccaaatagctgccgaaaaaagcaaagaataacgtattcgtattcgttcctaaaatatctctcccgatgcttaatccgaatgtgtacagatcttttctgctcatggacggattatgactgtaaatttcccgcatgggtgaagtaatggaaatcgcgacatcggtaatcgcccctatcgtgcccatgatgatcatggctgcggtaaccttcacaaaatccaccccgacaaacagtgtgaatatgccgatatcacccaattcttcttcaccgaatccctgaatcgaagtatgttttgttacagacataataaaaaacagcagcagtacaatcgtcagcattgcagaaataaaggcggttacggttttgacgtttcctccattaatataaaaaagagtaatgctgcaaatcacggcggaagagagcaatgttaaaacaatcggattgatatgcgggtctgtcatgaaaatgatggtgagaaagagaacaccgaaatttaagaataacgcaataaaagacctcgctcctttttttccgccgatgatgaccatcaatagaaataaaatcgccgcgagaattacgatgacattcatgagcttgccttctttcgtttaataaaaaagatagaagcatacagactggcgggtatggctaatacaattccgatccctccggccaatgctctggctatttccaaggaaatgttcatagaaagagtgaatcctatcggggaatcatttttcaaatacaacagcatcatcggaatagagccgcttatataagcaaaaaacagaatgttggtcatcgcccccatgatgtcttttccgatctccatccctgaacgtctgagagcttgtaatgagatacccttgttttcttcatataatccgaagacagatgatgtcatggtaatggctacatccatgaccgctcccagtgatccgataaataccccggccataaacaccgtgtgataagggcgggttaaatactgcatttcctcatatctgagacctttctctccggttgccagcatcaccagatacgtaatcagcagggaaacgaaagtgcctgcgagcgtcgcggcaatggcggcgtatgttttcgcgtgaaaaccgctgacaagcagcaatgagatgacagtaaagatgagaatacagataccgcagatgaaaattaaccctatattaggatgcttcctgtacaaatctaatgcaaacgacagtaaaacggcgttaaacatcaggctgacgatcgaaaagaagccttgtttttttccgacgataagcaaggtgaaaatgaaaacccacgcgatcagcaaaagctgtttatcccgttttttatctataatgcttcccgatatatccttgtttgatggtttccctttatcaatagaaacgaatacttcatcgccaatcgaatatttctgatcgttcgctccggatgatgaatactgattgggcaaatgaatgagctgtcctttctgactgccgttttcaagtctggcagtgatcgtctgattgaaaatcttatctttgtttttatgcatgtcctgtacgtcagactgatgttccaatgttgttttcgtcactttggcaatcggccgctcataaaaagaagcgttgtgagtgacgaaaatgagcgagctgataaaacagagcgctgttatcacgtaaaacagctttttcttgtaagacatgcggtttcgtttgtgtcctgttatcttcaaaaaaagtcctccaaacaggcggcgccgtatgaaagagaggccctgccgtgaagtgttaaacgatgcggatgtatgtctctcgcgaataacgttcatattttatcactcggccttacggctgtcgactaagagggggaccgagagaaaaagctcccctgaaatcagatcaggagagcttttggatgaaccgcccgataaaagcggtctttttatgcttcgttcactttttttgcttttcttctttgatgcagatacagtgccgttccgagcgcgctgatgagtaacccggcaagaaggatggaatacatcgttgtggccgtatcaggaagcaggccgcccggcgatactccgtcctgcgcagggccggatgacggtttttgtccgcttggctgctttccggagccttggtctccgcttggcggcggcgcgctcttcgtgtttgcgtttaatatggtgtattcactgaaatgatttgtatagcccgtgacgagatcgtgtgaaaccgaaccgttgtctgtttttgtatagacgttctttttccggtctacatggtaaatgcccggctgtttcgcctttttcgtattctcaatgcgcagggtgagctttaccggcgctttgaatgttttgatgtctttgtttttctgcttcattgtaaagtcgtatacatttgaaagcgccccgcttacttttcctttcggcgtcacgccgaatcgtgtatcagctgaagcagcgtttgccatcggcattttcatgctgaacttgtcatgcaggatcgtaagggaagaatccgatgttctgtcctttaacaggccgatttgttttttggtcacgctgagatcaatcggctttttggcgccgtcattcttatcgtaatacacgatcggcgtgtttgcgtttttggcataggcggcaaatgcgctgtcaccttcaagcgtccacgaaccgtttttttgtttcgtcggcaggtacacttcctgcgcgcggccgtcaactttcggttccaccgcttttcccgctttttcaagctgctcggtgaagacctcatagtcgacaaagccaaggtcttctttatgggacgcttcgttaaagacggaatatccgtctccgccttcaccgacaaagttactggtggcgactctgtatgtcttcttatcagaaatcggctttacgctgccgtcatcctgtacggccgcagcttgaagaacgcggtgtcccggctttttattcagtgtaaacgtgtatgttaaaccggcaacttgagggaaggcgccgccttgagcctcaattccgcttaacccttgttccaaggcttgtttgatctgttttccggttaaatccgcgacgtaaagcgtgttgccgaacggcatcacattcagcacatcgccgagtgtgatgtctcctttatcaatgcccgcgcggatgccgcccccgtttgtgatcgcgatttgggcgccggccgcttccttcgctttttgcagcatgccgtccgcgatgaagtttccgagattggtttctttggagcggacatgctcgcgctggccgtcaagtgcgaccttcgttgagccgactttttcatttttgactgagacgagctcttttttaaacggatcaagctcttttttcagatccgggtcttctttcgtctgctcgttcactggaatcgcctgaagagaggattgttccggcaggacgatgccgtttttgtcaaatgcgacatctgcccggcctaaatattcgccgtattcttttgcttgggcgacgatggtcggctcttcgtttttgacaacttccattttatttacaagcgtatgcgtatgtccgccgacgatcaagtcgatgccttttacctttttggcaagatcgagatcacgctgatgcccgatatgtgtcagggcgataattttattgacatgttccttattctgtatttcttttactgtatcttgtgcggattggaaggcatcatgaaagacaatgctttttcccgggcttgatgtgacggacgtatcttctgtcgttaagccgaatacggcgactttttctccgtttacatcaagcagaatgtatggatagatgcctgcttttttctttttccctgccgtaaatgtgtctgcttttttcatgaatggtctgagttttgactctttggacacatcgacatttgagctgacgagcggaaagtcaggcgcttgaaaattgtattttccggacgggtcagccgcgctcccgttaccgctcaggaagctggcgagagcacccggacctttatcaaactcatgatttccgaaggtcattgcgtcgtagcccatgcggttcatcaattttaaatcagccagcccctgccactttgtgaaatagagatcgcctgagaaaacgtctcccgcatccagcaaaatgctgcggtcggtttcgcttctgatttctttgattttcgtcatccgcctcgccgcgttatcaaggtgggcgtgcgtgtcgtttgtatgcataacggtgagtttccatgcatcatctttcggcggatctgtgcccggttcatcatctttgaattggagcttgtactgtccgtagcccgcgttttgtgattcaccgatataggcgacgtcatctgcgcggtcggcaaacggctttgcggccaaggaagattcaaatgtcaggtttgtccctttgaccggaaggatggaccagttatgatcagcctgcggattaatcgttttctgctggatgatgtaatccattaagacctgcctgttctcatcggcagaagagtatacgattttatcattgcttaagtgagggaatcctccgccgcctgaagcgcggtaattatttgtgacgatcagaaattcctgcttggcgctgacgggctttccttgataagaaaggttgacgatccggcttgcatcgggatgaatgactgttccgttttcgttgtatttcgccggttttgtgacatcgacctgataggtgacaccgtcaatgacatcaaaattgtatgagcggtaggcgtcatttaaaagcgcttggctgccgccttttgcctgatcgatctgattaaattgccccgcggacatttcgagccagtctttcacttcgcttccgttcagcttgacgatctgaaccgtgttgtcatacaggtacaaatcgccgatgtttttgatggcgaggtcgccagcggaaatgtttgtatagtagtttgagccgttccgcccgccggctttaaacggggcgcccgccgagaggataggcagatctttgtattccgtatccttcatcttattttcggcgtaccatttttgcgcatccgttacgatttgaatggacggatcatctttgacttgggcgaagaaactgttgatatcggcttttgtctggccgacgggttctctgatgtatttcaatgtgccttcgtgcgcttttttgacggtattgacgacggtttcgttttccgacgtcacattgccggcaatcggctcgatgctgccttttgcatcttccacatgccacgcgctgtctgttttttcaagccggaggtcgatgacgcccgcatatttgccccagctgcttgacatgacaacggggatgccgttaatcgtgcctttatcgatgtcaaattgatcagcgcctttgtattcggcatcagggaaaagcccgtgctgatggccggatacgatcgcatcaattccgctgactttcgttgccaggtcaaaaacggcgttttccgctccggaagactgcgcttttttttcgatgccgctgtgggcgagggcgatgacgatatcggctccttcagctttcattttcggaacggttttctttgcggattccacaatgtcttcgacctgaacgcggccttcgagatttttcttatcccacgtcatgatctggggaggaacaaagccgatgtagccgacttttatctgatgcttgccgccgttttcatccgtgacggttttgtcttttatgacataaggcgtataacggttttcgccgcttaatgttttcacattggcgttaacgatcggataatcagcgcctttgattgtcccgtccagaaattcaagcccgtaattaaattcatgattgccgagtgttcctgcgtcataatgcagactgttcatcacttcaatgatcggatgggtctttgcgcctgaaataatatcatttttctcatattttacggcgtattctccgaggggattcccctgaatcaggtctccgttatcgacaagcagcgtattcgggttttcgcgcctgtgcttctcaataagctgagccgttcgggccagcccgaattccgttgtcggtttgtcgctgtagtaatcgtagtccatcatgttagcgtgaacgtcagttgtggctaaaatgctgagattcacactggaggatttgttttcttctgctttaatgggtgatgttgggaggattagactaagtatcataactagtggcagcagaatacggagtgtcatattgacgctgcatcgtcttttctgtattctcacctgttctccacctttcaacaaattttgtcatgcagtaccattgtaagaatattttgtgaaagttcatatagatttcatgatgattcttgtaaaaagatgaaaaatgaggataatgacctatgtgaaacggatgagcggcaaacgcgttacctatgtttgatgttagtgtggctggggtacatggatttatgtagacttcatcaagcaggaggtagtaactatgggtaaaaaaattgcagttgtattaaccgattattttgaggatgtcgagtatactgaacctgcgaaagcttttaaagatgcgggtcatgaattaaccgtaattgaacaggaaaaaggaaaaacagtcaaaggcaaacaaggggaagcggaagtgaaagtggatgcgtccatcgatgatgtaaatccgaaagactttgacgcattgctgatcccgggcggattctctcctgacatgctgcgtgcggatgaccgtttcgtccaatttgccaaagcgtttatggatgataaaaaaccggtgttcgccatctgccacggacctcagcttctcatcaacgcgaaagcattggacgggcgcaaagcgacagggtttacatcaatccgaatcgacatggaaaacgcgggcgcaaatgtggtggatgaagaagtcgtcgtctgccagaaccagctggtcacaagccgcacaccggatgacataccggcattcaaccgcgaatcattaaaactgcttgcgtaatataaaagcggagcgccgtatcaggcgttccgctttttttgtgaagattcccggataaccagctcaggcgccagaataatgcgttgttttttgtgctgggaactggtgattttatgatgcagcaattgagccgcttcttttcccgactgccgcggaaaggaagaaacagttgtaagcgggggataagaaatttcagcttccggcacgttatcaaagccgacaatgtcaatatcttcgcccggaatgagcccggcttttctgatcccttgcatgacgccgaacgcgaccaaatcactgaagcagaaaatcgcggtcgggcgctcagaccggcggaggagctccgtcacggcttcacagcctgcttcgcgggtcggcgcgctgtcaatgacatagtcatttttcacttccagatccgcttcacggagcgcttttttaaaccctttcatgcgcttcgtccatgttgatgagtgcttcacgccgcccagaaacgcaatctcctgatggcctttctcaatgaaatgacgcactgccttataggtgccttcctcataatcggctccgacaaaatcacagtcggcatcggcaatctccctgacggcgagcacgaccggaatgtcaagctgctcaaggcgggaaagggtttcctcagccgtacctgaaaccggacacaaaatcaatccgccgaccctgtgctccagcatggtcgagatcagctgctcctgcttggcgacggaatcaaatgtcgtgcctaacagcactgttaatccgacttcctcaagcgtattctgaacgccgatcagaaactctgagaaaaacgtattggaaatgtcagtaataatcaatcctaccgttgtggacgtctgtgatcgtaaattcgcggcgacccgatcatatacgtaccccagctcccgcatggattgcagcactttctcacgggtcgcttcggaaattcgcggattattgcggacgattaatgaagcggtggatgttgagacgccggcatgttcagcgacctgctgcaatgtcacccggcgttttttttgctgtttcatacgtcgtattcctcacttggtttttattcgttacatccattataagcgttttggcgcatgagaagaaagagagagggggagaaaatgataaagcgccggaagacggattgtccttcggcgcttctgtcacaataggttattcaaacatttgctctttaatatactgaacaggcatttcacggcctgtccaatattcaaacgccatggcgccctgccaaagcatcatgccgaggccgttaatcgtgttgcagccggccgcttgagcttgttcaagcaatttcgacgtaacggggttgtaaacgacgtctgtcacaatcaaatcaggacggagcatggatgtatcttcaatgacgctcaagccttcaagcggtttcatgccgacacctgttccgtttgtgaaaatatcgcttgaagcgatttcagcacgcagcgcatcttgatcttcgagcgggaagactttcgctttgcaagaagatcccttcatttcttcattgatgatgcggacgttttcttccgctttttcgaaaaacgcgtcattgcgggcgaaaatagagatttctccgagaccttccaatgcggattgaatcgctatcggagtggcggccccgccggaaccgaccagcgtcatttttttgcctgtgatatcgatgccgtgttcttttaagttgcggacgtatcccataccgtcagtggagtgtccgatcagtctgccgttttcattaacgactgtattcaccgcgccggtgaatttcgctgaatccgcgagttcatcgaggtaagggagaatgttcatcttgttcggcatcgagacattgaagcctctgacgtttaaggcgcgcattcccgttaccacatcttccagctgttcattgccgacttcaaacgcgaggtaagcgtagttcaatcctaattttttaaacgccaggttgtgcatcgttggagataaagagtgtccgatcggtgttgcgaataatccgataagctgagtttttccgttaatccgtcctaaatctttcttcatgatgtattcctccgttagtccattcatttgtttttcatcccgctttgagggcagaaaaacgctgattacatatgtttatttaaaatgctgagtacgctgcgcaattcttcaacgggaatctgtccgggcgctgatgcttctttccccgcgccgaacgtgcacgctgagccgaagacttcgccggccaggcggctgatcaggcctgttcccgccattgacatcgtgatgatcggccggtctgcgtattgtgttttcatcgtatgagtggcatccaataagacgaaaacatcttcagtgctttgcggcatcaccgcgattttcggaatgtgcgcgccgtacgcctgcatgttccgcagccgggaaatgatttcttcttttttcggtgtctgatgaaaatcatgattggacatgacgacatatacgccgttgtcttcagcggttttcacaattgatttgacttccgcttctcccgtaaacaactcaacgtctgcaaggtcagtgtgttttgtttcgatggcggttttaagcaattcaatgtaaaagcggtcatcaataactttatttccgccttctttatgagttctgaatgtgaaaagcagcggtgttgcgcctgcggctttccgcagcatttcaagcatgtcttttacggcgtccaggctgtcaacatgctcgtacacatccgcccgccactcaatgatatccgggcgaagcctgttgacggcttcaatttcttcgagcagttctttctctccggccgccatcagcggcacaatgatcttcggaagcccttcgccgatgaccgtgtttctgatcgtgatagattgcatgataaatcctctcccttaaaaaatagtcaggctttcatcacttgcttaaagcggattccgataaacaatgcgagaagggcgctgacggccgcaattccgatatcaagcagaaaaacaggcgtcaggccggccgctttggatatcgctcccgttacaagcggaatgacaataaaagataagcttgatgctatattaacaaaagatgtgattgtacctttatttttagggaataaaacagccataaccgtcatcgccaattgcagaatgcccgcagttgaaagtccgatgacaaaggagctgatgactgatacggccggctgatgaatgaaaatcagagcaagcagcgcgattgccgcgatcacagggtacagcaccattaccgtaatcggctgaatcactctgtttaacagcacagccagcaataatacggacacaagcgcaccgatgctgtaatagctcagcaatttgacagcctgcacctcaggcatgcccaaaacggtttgcccgaacttaggaagccatacttgaacgagcataaacagcgccgtagatgaaaagcctaacagaatgatcgcaagaccttcgcgccatatcgacggctgtgatgtgaacgcgtcatcagacggagaggcttccgtccggccgccgtcttctttttgcttatgattcggaaacggaacttttaacaggaaaaagccgttcaggaagaaaataatgcccggtacgaaaaacgtccagccgtaaaacaaatgcctgtccgcaataaacgcgatgaaaaacggaagcaccgtcgcgccgatggatacaaacgctttgattaacacggttgcagagcttgcgtttttcggaaatccttcaataagcgccggatatgtcccggaatccaagaaggaattggcgatccctgcgaaaatggcgaagataaacgcggccgtatagtttgtcgaaagcggaattccgattaggaaaatcagatacagaaaggcgcccgacacgataaacggccgtctcccgaatgtatccgaaagcttcccggcaaacagaagcgaaatcagcttcccgatcccgatggcggagaccaaatagctgaccccggctgcggatgtatgaagctgttttgataatgcctccatattggatgcgataataatattgatcatgcccagcaggaaataattaatataaagacccgctgccattttggtgtatatgtttttcatggtgacatcccctaatgcggttaataaagaattaaattaatttttaaattaacaaaagcacagaaccattcccctttattgaaccactgcctttctttgaaaactggtttgataaaacggttgcagatacaaacttgaataacgctgatatcacaacgagtatatcgttctactaaataaaaaaagataagcggcccgctcatttagtatatcgttctaccaagttcacagttactatactccttctttttatatgtgtcaaaccgatgaacttttatttttcacttttttaaatcaaaaaaagacccgccgtttttcggcaggtctgacatgggtttattttctgagagaggcgagctcctcggcaatggcctgcatttcactcgggctgaatgatgcttttttcatgaccatttgatgaaggtatgtaagatcttctattttttcatcactgaaatcttccgctctgatgacgccgacattgagcatgttgagcttttgcgaaatgtcttcaatcattttgtttaacgtttctgtttgttggctcggcaaattcatgcatcctttcatgaccgttttcgtaccctttattctaacagaattcatttagaataaaagcttatttccacagcagcagaaaagttgctaagatgatgataaggtttttgatcctcaaaatgcggggaaagaatagggaggttatcgatatgatacatgtgctgtttgtctgtctgggaaatatttgccggtcgcctatggcagaggcggtattttctgatatggtgaagaaaaacgggctgaacgggcagattaacattgattcagcgggaatcggcgcctggcatgcgggaaatccgccgcatgaagggacaaaggagatcctaaagaagaaagggatcagcgcaagcggcatcacggcgaggcaggtgcgtgagtctgatctgaccgattttgattacgtcattgcgatggatgcagaaaatatcggacatctgcgcagcatggccggttataaaaaagcggcgccgcgtattgcaaggctgcttgattatgtaccggagtcggaccttgcggacgtgcccgatccgtattataccgggaatttcagcgaggtgtacgctttggtcgagtccgggtgccgtcatttgctggagacaataaagaaagaccatcatttataagggggattgaccgatgaagcagacacgcatcatggcaaaagcgattctgatcggcgctgccgccggcggagcactgtccttattacataagccgacaagagaggcatgtttccggaacatggacgcgtgcaggcagcgtgcggcattctaccgaaaacatcctgaagtgctgaaacagcaggcatctgcaaaacttgatcaagtgaagaccatcgccaataccgtatcggatgatctgagttttttaaacggccagatcactaagctgaagcagacgacaccgcaggtcattgacctgttaaaagaaacgaaggagcatttttcgaaaaacgatcattgaggtgggatgtcatgagttttataaaggagctgtttgcaaggttttctctccatgaaggacaaagtaaatcggcggagctggcgtattttttcctgctgtcattgtttccgttaatgattttcatgctgacgctcaccgcctatcttcccatatcggcagaagacgtgctcggggcggtcgatcaatacgcgcccgacagcgccatgtctatggtgaaatccataacggagcaaacgctgaacaagcgcagcggcgggcttttgtcattcgggattatcgccgtcatctggtcggcttcgaatggtatgaacgcgattgtcagagcatttaaccatgcctacgaagtcgaggaaaaccgctcatttatcatcattcgcctgacctcaatttttttaaccatcgcgatggtggttacgattttaatcgcattgcttctgccggtgttcggcagagaaatcggaatgctggccgcagatttcatcggcgcctccggcctgtttttgcaggtgtggtcggttgtccgctggggtatcagtccgcttatccttttaatcgtgtttaccgcgctttacattttcgcgccgaataaaaggctttccctccgttttgtgctgccgggagccgtatttgcggcagccggctggattatcgtcagtatgctgttctcattttacgttggcacctttgccaactacagcgccacatacgggagcatcgggggaattatcgtccttatgatctggttttatcttacgggaacactgctgattttaggaggagaaatcaacgcgcttttacataaacgtaaaaagcttcctgatgaaaatccgtaccgcgggagcaagctatagaggaacggatgacgttcaagctgaaaaacggagggaatcggctatgaccaagcatacgaaaaaaggcggaagccataataaacaaaactcaaaaaacggcccgaagaagaaaacaagcggaagcgctaacgggcagaacggataccattagaaagaagccgcctgacttagatcaggcggcttttttatgaggccggaaaagaatgggattcggatgcggggctgtgctttgttttcccgaagacgagcgcaagccaaatacagaccagaatcaccgtaataaagtaaaacaaattggcgctttcaaaccgctgcatataccagccgcccgccaccgggccgatcatgctgccgaggctgaaggaaatgccgcagagcagattgcccgccggcagcagatgggacggcagcaggtcgctcatatagctgatgccgagggaaaacatactgccgaccgccattcccgccgtgaaaaagcagcagccgatgacagaaggcgacggaaacagtccggccgtcaaaaagcaaagggcacccgttaataagatgacgagcaggacacgttttctcccgaatcgatcgcttaataaaccgagagggaactggaatacaatacttccgatggcaaaagcgggcaatatcagcgcgacggcatcgacggatatgcctaagcgcagggcgtacacaggaaagcttccgttcagcgccgtttctaaaaaaccgtacccgaaagccgggagaaaagcgacccagccgaaaagaagggcgcggtaaaaacgttttgcgctgttgtccccggatgtttcatccggaccttgcgccgggtactcgttacgtaagacaaatacaaacagccaggcggcaagactgatacagccggatacgataaacggaagggacggacttgttttcacaagagggaccatgaacgggccgacagcgaatccaagcccgaaggacagtccgtacagcgaaatgtttcttcctctgtttcggggcgttgactttgacgtcacccacgtttgggttgaaaaatgcagcatatgatccccgattccgataagcagccgaagaaaaaaccataaccatatggattgaagccaaataaaactgaataagctgatgataacaagaaatccgcccatgaccatcagaggtttgaatccgagcttgcgcaacggggcctccataaacggcgacgccagaagcacgccgatataaaggccggttgcgtgaagtccgtttatagcggctgattccccgttcgtttcaaaaatgacggagatcaccggcagaagcatgccttgggaaaatccggagatggaaacaagcagaaccaaaataaagaagtacagtcgtgacatcgcgtatttctccttcttcagtatctttcttgatcgtacacggatttgctgcgtccggcaacctgaaaatgccaattcgggctgccgcggaagtgtaattgagggagtttttgagaaggatataagaagactcattcgaaaaaaggagccaggcagatatgaatcggatttttttctttacggctgcggcgggagtgccgctttcagtcatcggcggcctgatgcactggccgtcagcggttttgtttattatttattgcttgacgattattgcgcttgcaagttatatggggagagcgactgaatctcttgccattatcgcgggaccgcggatcggcggtctgctgaatgccacgttcggcaatgcggtagagctgattatatcgcttttcgccttaaaagaagggctgacgggcatcgtgcttgcttcactgaccggttcggtgctcggcaatcttctgctcgtcgcgggactgtcgttttttatcggcggtttgaaatacaagcggcaggaattcaatattcatgatgcccggcataattctggcctgctgatttttgccattatcgttgcttttgtcattcccgaagtgttttccatggatatgggggaaaaaaacaagcttgatttgagtgtcggcatcagcatcatcatgatccttttgtacgtggcagctctttatttcaagctcgtcacccaccgcggtgtttatcagccgaatcagccggaggcaaaggaagaagaggagcagcctgagtggtcggggaaaagagcgacagccgtcttatttatttcaaccattatcgtcgcctacatatctgaaaaccttgtccatacgtttcatgcggtggctgaacagttcggctggagcgagctgtttatcggagtgattatcgtcgcaatcgtcggaaatgccgcagagcatgcgtcggcgattattatggcgtacaaagacaagatggatgtcgccgttgaaatcgcggtaggctcgactttgcagatcgccatgtttgtggctccggttcttgtgatctgttccatcttttttccggtcaatatgccgcttgtattcacattgcccgagcttgtcgcgatgatctcatccgtccttttgatgacgatgatttcaaatgacggtgattcgaactggtttgaaggggctacgctccttgccgcttatgtcattatggcgatcggttttttcctgctttaacctgtaaaaaatgcggataacaacgattgcggaggaaaagactaaaggaaaatgctatagaaagagtgatatgatgagaaagctgtttcatgccacactgattctgctgttatcctttagttttttcgcaacgccgtctgccgctgcaaaaaaaccgtttaaagttcccaactctgtcgtaagcatttcaaaggaaaatacgtatccgaatgcttcacaggaccagccgatgcttcagccgagcaaactggcgaaggaattgttagatacatcagagatcaacatcgaaaatccgcatctgataaagatgctgaatgaatcctcggtttccggttcaccgcttgccatcggataccgggcgacaatatttctcgggaaatgggcgctcggctatcagtcgaacgaaacggtcgccaactgggaatataaaaaaatcaacacaaacagagcggataaccggggcggacagcaaaccgcggttatctcatacgcccaagaacagcaatacaaaatcaaaggcgggctcacagcgaaggtgccgaacacagaagacgtaaaaagcatgatgatgcaaaaagcgatgaagaaaacaaaactgccgctcgcgtttgaaacggttatcggcgcaggcacaaaacgcgatcaaacctacaaaatttctccgcagcggctcggctacctgcacgcctacgctccggccgttaatgaaaaaggaaaagtaacatacggtgaagtgtatttggtgctgaaaggcagcaagcggaaacttgtcgtcaaaaatgtgacttcgcaaggaatcggagcttggattccggtgcaggatcacgtcacattcggttttcaaatgacagcgcagccgagataaataaaaaaagctgattccggttcgggaatcagcttttttgtgtgtgatacatttcctcgagcaattgcacattgttgttgtacagctcccgggcaagaacgcgtctcaccgcaaggctcgccgagaagtattctgtgtcttgaaccatgccttttactgtaaattcaatgcctctggttaatttgttcagactcataattccatgcacttgaaacggctccgtcgcattgagaaattcatcccgcttcagtgaatcgcgaagctcatcattgagcatatcgcaggctttttctaagacggcatatacccgctcgggatcttccttgtaactgatcacgacggactcggtaatccgcataaaatcaatgttatagttttgaagctgtctgacctcaccgttagatatggtaagcagcttgccggtccactcacggatctggagggaacggagtccgatttcttcgactgtgccgttgaacagattgttaatcgtcacataatcacctttatgaagctggcgttcgtatattaaaaagacaccggccaatatgtccttgattaacgactgggcgccaaaaccgatgacgataccggcaacacccgccccggctaaaattcggccgaaatcatgaacgaataaagaaatgacgtaaaagataaaaccgatcgtcgccgtatactgggtgatggatcggacgaggctttcaatcgtcttccctttccgttcctccaagaaatccgtgcgtttaaataacacctggacaaagcggttgatcagaaaaacaccgacgtaaagcacgagagcgacgatgatgatctcaaccactttgcttttcaaaatgtccgtaattgtcgtttccatcttttgttaacctctggcttttcgtaatgaaaaatctgtgtcctgataataactgtttttgacaaggacgttcgggccgaggcaccggacgtttgtgcagcggcagttcagctctttgctcagcttcgtctgtctccacttgtcatatgcttcaggaaggctgtctgttttaatattgccgagcggcggtgtatcgccgaaatccgtgacaatgatatttccgtcaaaaatgttgacattcaggcgggagcggccgtcagggtcgtttcgcaccgtaacgtttttcgcttcccgcaggcggaggaggagcttctgatcttcttcatcagggctgcatgcgtaaaacgggagcgtaccgaacagcatccatgtctcttcatcgcgaatgtcgagcagatgatgaatggcctgtctcatgtccgtcaggctgagtgattcaagcgcgctggcgaaatcactcggatacatcggatggacttcgtgccgctggcatttcatttcttccgtaatttgccggtgaatatgttcaatatgcggcagcgtccgtttgttcagcatcgtttccgctgaaaccattacgcctgcttcgaccagcgtgcggctgttttcaatcattttgtcgaaatagcgcgcccgctgttcaaatgtcggtttcttctccatcatcgcaaatccgatgtcggcaaagtcctcgaccgttccccaattgtgagaaatgtgaagaacgtccagatagggaataatccgttcgtagcgcccgatatcaagcgtcaggtttgaattgatctgtgtgcgcacgccgcgttcatgggcatatttcaaaagcgggacgacgtattcctttaccgatttcagcgaaagcatcggttcgccgcccgtaatgctgatagagcgtaacagaggaatttcatcaagccgctttaataaaaggtcgatcggcagcgcattcgggtctttcggctggagcgtgtacccgacggcgcagtgctcgcatctcatattgcacaaagtcgtcgttgtgaattcaacgttcgtcagtttcatatctccatactggtcgacatccatgtacgcttcccaaggatcgtactccggtgtgatcggacgcagtgttgtgttttgtgtcatgactatctaactcctttataaatggggcatactaacgtctgccaactgttaattttagacctgatctgccaagatcgcaagtagcggaaccattgaaaaacggcaaaaaatacgctaccattataaaaaatgaatggagtggaagtatggggaatgcagtaaacagcaaagatcagcagctcgattacctgaagaacagactcgatatgtttatgaatgtcattgattcattagaccctgaatcaacggacgttgaagatatagaccggctcatcggcatgcttgatgatctggaagcaaaatacgaacgctttaaaaaggattgggaataaaccccggcggatgccggggtttttctttttccataatgcggctgtataaaagggcagagcctactgcaaaataaggaaaaatgcagaaggagtgctggtcatgaaatggttttgttcaatttgctgcatggccgttttacttgcggggggcatcaacagcgcagaagccgtgccgaatgaacggataaactggggatttaaacgcagcgtcaatcatcagccgccggatgccggcagacagctggacaatctggtcaaaaaatatgatgccttttatttgggcaatacgaaagaaaagaccatctatttaacgtttgataatggatatgaaaacgggtacaccccgaaagtgcttgatgtgttaaaaaaacatcacgtcacgggcactttttttgtcacgggtcattttgtgaaagagcagcctgatttgattaaacggatgtcaaaggaaggccatatcattggcaatcattcttttcatcatcctgatctgacgacaaaaacgggcgatcagattcaagacgaactcgattccgtcacggaagctgtgtacaacattaccggaaagcgggacaacctgtatctccgtccgccgcgcggcgtattcagcgaatatgtcctgaaagaaacgaagcgcctcggctaccaaaccgttttctggtccgtcgcatttgtcgactggaaggttaacgagcaaaaagggaaacaatacgcctatgatcacatgataaagcaggctcatcccggcgcgatctaccttctccacaccgtttcaaaggacaattcagaagctctggacgatgccattaccgatttgaaaaaagaaggctacacgtttaaaagcattgatgacctgatgtttgagaaagaaatgaagctgccgcgcctgtagaaaacacctctcctggtaatggagaggtgttattttgttattttaagcttttaatcagtgcagcccaatccagatccccgaagccttgtgcgatcccgctttcaaaatggctcttggccagttcggcaagagggagttttgcagaaacctgttctgcggcggcgagcgccagattggtatccttcagccctaaagacattttgaaaccggccggctcaaatttctgctcagccatgatcgtgccgtaattttgatagacgggagagccaaagagcgcgccagcgatttctaaaaattgtttttgctctaacccgtacttctccatcattaagaatgattcagataacgcctccagcatagaaacgagcaagaaattgatgctgattttcgcggcattggccgtttttgtttcttcaccagtgtcaaatacttgctgactcaggatgttaagcagcggttcggcctttttcttcgcttctgccggtccggctgtgatgatgcgaagctcggccttctcggcggcatcggggcggccgaggacgggagcggcaataaaggactgccctctgcccgaatgtgcggcggaaagctgttctgacagcgccgtactgatcgtgctcattgaaatatgaatgccgttttcagataacccggcaataatgccgcaagctccgaaagtcacgtctgttacggcgtcatcgtctgacagcatggacagcacgatgtcggcatgttcagctgcctggcggggcgtttcggcatatccggcccctttttccagcaggtcagccgctttttctttcgtccggttatatacagtcaggctgtatccggctttcatgatattttcggcgatggggcggcccatattgccgagtccgacgatggcgatcttcatttcacagtccctccaatgaaaagttttccaccattatacatgcaaaatggttaatctgctgtgtacaggattgccactttcagttcaggttctgaagaccatccggagtctgaggcggctttccccttataaaatccggtaaatcgggttttgatgattgtttttgaacggggttttacagtgaacgtttttgatttgaatgtgacgtcctttatgttttctgataaatccggggtgacagaaatggtttgttccccttttccgtaatgattgatataaagcgtgcagctcatgcccgctctttttcgctcaaccagatgactgcattcgctgcggtgcttcaaatactcgacagcctctttttcgggcgcgaactgttttaaggaaaaaacggcatattcggtggcaggactgataccggaagcggcccccatactgagaaagatcagaaacagccccgccgcgggaagcgtccgcctgaacgcggcggcacaccagattaacgccgcaaagtaaagcacgaccccgggaatgacggagatatgggctccatcttccggccaagaggaaaagccgagtaactcaaagatgtaatcagacaccgtacggccgttatacagcggggcaatggacatgacactgaaagccaggaggacagaagaaatgattttgtgagaaaggatggtaacggcgcacacctctttacgtttttttccagactatcatgttttctcaaaaaaaagaacagccggcagccgttcttacttgaaaatattaaaccagcctttgcgggcgaaccaaaacagcatggcggccacaagaacggccattacgcccaaaacgataaaatacccgtatttccaatgaagctcaggcatgttatcgaaattcatgccgtaaacccctgcgatgaacgtcagcgggataaaaatggtcgagacgatggttaatgtcatcataatggcgttcatccggtttgaattcagcgtcacatagctgtcccgcaaatctgacgtcatatcacggtttgactcgatcagctcagccagttttaacaggtggtcataaatatcgctgaaatacgctttcgtttcacggctttcttttacatggtcaaggctcaaaatccggtacattaaatcgcgcatcggaatgatcgtccgcctcaggttcaaaagatcagtccgcaattcaaacacttcattcattaaagtgccgtaagatttatgtgttctgctgtcctcaatttcattcagccggtcttcaattttgtacagcacggggaaatattcatcgacaagctgatccataatcatataagtgatgtgcccaggcccttttttggctaatcccggagaagcgaaaaaccgttctctcacctttgagacgccgggcgattcgtgcaaatggaagctgacgatgaaacggtcggactgaaaaatgtccacctcttccatttccagtgtgtccgggttcagagcgtggagcacataaaaacggtagccgtcataatggtcgattttcggccgctgcatatgctgaaagcaatcctcgatcgcaagcggatgaaagtgaaaataatcacgcagcagctcggtttcatgcatctcagcgccgaaaaaatcaatccagtaccatgcgatgtccggttgttctgtacgtgatagggggatattatctaatatctcattatgtgttgtgattgcggttatatgtatcataaacaaccctccgcctgccattatatcatgcggcgttatgaagaaaagtatacgaattgccgcccggccgcttcatgatatacttggacaaaaaggggtggagcatatgtggaaggaaacggtttcggtcacaccgccgtatcattttgataaagtccttgaaaggctgtcgctcgatccgctgaatgcggtcgatcttcatgcaagatcaatcaaagtgccgctcagaacacgggacggcaaactgtccgtcatcacggttcaagcggaaggcaccgccgcagacccggtcttcctcgtcagcggagaaacggaccgcgaggagatgattgaacggatcaaacacatttttcagtgggagcagccgcttcagcctgtgcttgatcatttctcaaaaacaaatctgtcggcgctttttgaggagcatgcgggaaccccgctcgtcttggaatatgacgtctacaactgtctcatgaaatgcatcatccaccagcagctcaacctgtccttcgcttttactttaacggaacggttcgtccatgccttcggtgaacaaaaagacggcgtctggtgctatcccgagccgaaaacgatcgcggggcttgagtatcaggacttgcgggagctccagttcagcatgagaaaagcggaatatgcgattgacatttcacggatgattgcagaaggagcgctcaatctggcggaacttacccatttgtcggatgaagacattatgaaaaagctgatcaccatcagaggcatcggcccgtggaccgtccaaaacgtcctcatgttcggcctcggccgcccgaatctgtttcctttggcggatatcggcctgcaaaacgccgtcaaacgccgcttcgccctagaggataaaccgtcaaaagacgtgatgctccaggtaagcagcgaatgggcgccgtatttaagctatgcgtccttgtacttgtggagaagtattgaatgatgaggatttttggaaacttccagtgaaaaacatgaaggaaccgccggctgcatgttatactgaaaagatgtgatatttcaaagcagccgttttcccaggagaaaggctttatatagaaacggagagaaaaaaacgtgaatcaacatcaaaaaaaggcgcctgccgaattgaaaatcggacagacatttccgctgaccatcaaacgtctcggcattaacggagagggcgtcggctattttaagaaaaaagttgtcttcgttcccggcgctctgcccggtgaagaagtcgttgccgaagcgacaaatgtgcagccgaaattttcagaagcacgcgtcaaaaaaatccgcaagccgtctgaacaccgcgtcacgccgccatgcccggtctacgaccagtgcggcggctgtcagcttcagcatctggcatacacccagcagcttcgcgaaaaacgcgacatcgtcattcagtctctggaacgtcatacgaaattcaatgtcgaagaaatgaacattaaagatacgatcggaatggacaacccttggaattaccggaacaaaagccagtttcaagtcggacgctcgcaaagcggcagcatcattgccggcttatacggacttgattcccataaaatcgttccgattaaggaatgcattgtccagcatccggcgacaaacaaaacaacgggtatcgtccgccgtattttggaaaaacacaacgtatccgtttataacgaacggaccaaaaaaggcgatgtccgcaccatcgtgacgagagtcggttttgaaacaggcgaagtgcaggtcgtgcttgtcaccgcgaaagagacactgccgaataaagacgaaatcgtcaaagccattcagaaccgtctgccggaagtgaaatcgattattcaaaacgtcaacggcgcgcgcacatccgtcattttcggtgacaaaacaaaagcgctggccggaagccatgccattcaagaagtgctcggcgacgtgtcatttgaactgagcgcccgcgccttcttccagctcaaccctgagcagacggtcaagctgtatgacgaagtgaaacaagcggctcagctgacaggaaaagaaaaagtcgtagacgcgtattgcggcgtcggtacgatcggcatgtgggtctcaagcggcgcaaaagagatccgcggcatggacgtcattaaagaatcaattgacgatgcgaagaaaaacgccaaaaaacacggcatcaaaaacgcggcatatgtcacaggaacagccgaacactggctcccgaaatggacgaaagaaggcttccgtcctgacgtggtcatcgtcgacccgccgagaaccggctgtgacagaacatttttagataccatcaaaaaagtaaaaccgaaacgcttcgtctacgtatcctgcaatccttccacactggcgaaagacttgcagacgctgtcgaaggactatcgcgtcgaatatattcagcctgttgatatgtttccgcagacggctcatgtggaagccgtggcgaagcttgtattaaaatcgtctaactaaaataaacaattcgtaatcagacctggatttcggtaaattaaacaattccgatttccgggttttttcatgttttgcccttgtcctatctgtcttttgtctttatttaactgataaaaagagttgaaaaaaacgtatggaaaagcaagtggaaaacagccaagtaggctgctttctattaacactttctttttttcgtttggaaacggcattacagacaaaatatgaagatattgttgtgaaccagaagcaataacaagtcgtccaagttccgtgaatacttgtaatttcagttaatattttgtaaacttctttcttaaagaataaagtccccgacactcatcggcacatctactattggcgatagttgtaataaatgataaaaaggaggtgaaaccgaatgagagatattggaacctcaaccactgaacgaaggttctgaagcagaagctgtaaaaggcaaggttgcttacttacactaatcacaacggcagttggcacatctactattagcaacaactgtggataaaagatcaaacacactaaaaaagcatgtttggtcgttatacatgatatgaaagcctaaacaggaaaaaaggaccccgattattttccttattcccaaagaagaaataaatccgaggcggaaacgcaagtgataacaactattacagtaatacctgcgatggttatatccttaataagtaattatcgcgacaatcatgcttcatcatataatgatgttagattgacacttggctaaaaagtattgcagaaaaggaaatggataatgaaatggataaagtaaacaaaaaacgaccgttgtataaaaaaagttggtttctcacggttttggcatttttagtttcacagctttattttaattttgcagaattaacgggatggggtcctaattatagagaaatgaatggattcccagcaaacatagctgaactggatttctttcaaacatatctttcattctatgataatccatggtttaatattgtcactgttttcttgggggtttttactgttatacacataatcataggtataacaaaggatattcgaaatgaaagcaataacttctgatgccttatttaatgatgaaagaaaatgaacactttcttattaatcttatgaatgagactgcgacacttagtcagcagtctattttattggttttggatcaggattaccgaatcgtaaccttatacaaacttttataggtaattgtataaagatattaacatatggccctctttactccatgtgattcacaagcggtaagttaaggctttttctttttacattctcttcagtactcagatataccacccccagccccatttgcttaatcaaatgattttttcgcaaaatgatattgagatacggatatggtgcacgttaaatattttatcttcgataacaggacaattattttgcattggtaatagggagaactcatatgatattctatttaggttggaatccttttgtccaaaaagagcaaaagtaaggccgcctaagaaaaatgaaggtcagcgctactattaataaaccacaatataaataaaaaataggtgtagataatcatcacacttttctctctcaaacccttttaaaggttaaggagttggctgagttgatcagaaatgagcgatatggggttaactatagcgatagtctattacgttaactcaattaaggcgttctgcttcagtttgcttttcactttttcacgtgtaaaaagtgaaatgttcaaaatttactatcgtttgataagaagtgctgacacatgctataagtgtaaaagaagcatggtcagtttttaattttgggataaaggtttggctgtatcccatcatgaaaggatttggatttgttatgacagataatttctggcgtgaattaccgcggccattttttgtactggcaccaatggaagatgtgacggatgtcgtttttcgccatgttgtgagtgaagcaggcagacctgatgtgtttttcacagagtttacaaactcagaaagctattgtcacccggatgggaaggatagtgtgcgcggccgtttgactttcacggaggatgaacagccgatggttgcccacatatggggagataagcctgaaaactttcgccaaatgagtattgggatggcggaattagggtttaagggcctggatatcaatatgggctgtcctgtacctaatgtggcggggaatggaaagggaagcggcctgatttgccgtcctgaagttgcagccgaattaatacaggcggcgaaagcaggaggtctgccggtaagtgtgaagaccagacttggctacacggatatagacgaatggcgcggctggctgacacacatactgaaacaagacattgcgaatctttccattcatctgcgtacaagagcggaaatgagtaaagtagatgcgcattgggagctcatcccggaaatcaagaaacttcgtgatgagatagcgccggataccctattgacgatcaatggggatattcctgaccgtgaaaccggcttgaaactcgctgaacaatacggtgttgacgggattatgattggacgaggcatttttactaatccattcgcctttgaaaaggagccgagagagcatagcagtaaggaattgcttgatcttttgagattgcacctggatcttcatgatgaatattcaaaagcagatgctcgagcatataaaccgctccctcgctttttcaagatatatctccgcggattccgtggagcaagtgaattaagaaatcaatgcatgaatacaaagtcaacagatgaagtgcgtgcattgctcgatgactttgagagaaagtatcttgataagatggagcaagagtgacctaaacaactcttcatccggcccggatttcggtttgaattccgggtctttttgtgtgcagtttttatccagacagatccatggccagtttcgtcatgcagaaataaacgaatcatggtacattgataggacatacatcataaaggggagagaaaaatgaaacgactgtgcatcatcccctgcggcaagaaaaaaatttgggatgtccattcagatacaggtccggtaagggcggaagacgcttatctcagcccgtttcatcaggcgtgcgagcgatatgcgaaagcatttttcgatgagtgggtgattttgtcggcgaagcacggattccttcgtccggatgatatggttcccggaaattacgatgtcacttttggaaccggtcatccggagatcatggcagcggacgagctgcgccgtcaatttcatgaacaaggcttttccgacatcgaagagcttgtcatgcttggcgggaaaaaataccgaagcgtcctaaacgccgtcatcggagagcatcagcatatcacctggcctttgtcatcgtataaaggcattggctacatgcttcaagcgctgaatcgggctgttgaagaaaagcatgaactgcagcacgtggatatgaaaaaaagagtgtaaccactcaatcgccacgatagactgtatgcagaagaatgaagcaataaaagatttccgaggaaataaatacgtcgatcattgtcaaagacagggtgatgcccggtcttttttgtatgccataaaacgagacaaagggaacagatcgagacaaaatgagacacctgtctcaaactgtctccattgtaaaaataaaaacattcattttacgggcttcaaaggctggcatgcttcttgcatttataagtgtgaaccctaaatagaaggaggcgcacaaaatggaattgttaaaacgagaaggcttgtcattaactgaggagaaagcgctgtggatgtaccaaaagatgctggaaatcaggggctttgaagacaaagtgcatgaactgttcgcgcaaggagtgcttcccggattcgtccatttgtatgccggtgaagaagcggtagctgcgggggtgtgcgctcatttagatgatggcgacagcattacaagcacacacaggggacatggccattgtatcgccaaaggctgtgatctggacggcatgatggcggaaatattcggaaaagcgaccggactgtgtaaaggcaaaggcggttctatgcacattgcggatcttgataaaggcatgttaggcgcaaatggaatcgtggggggcggattcacgctcgcatgcggatcagcgctcacggctaaatataaacaaactaaaaatgtaagcgtttgcttttttggggacggagccaataaccaagggaccttccatgaagggctgaacttagcggcagtatggaatcttcctgtcgtgttcatcgccgaaaacaacggttacggcgaagccacgacatttgagtacgcatcagcctgtgattcaatcgccgatcgggcggctgcctacaacatgccgggggtcacggtggacggaaaagatattttagcagtttatcaggcagccggggaagcgatagaaagagcaagaaacggcggaggcccgtctttgattgaatgtatgacttacagaaactacggccatttcgaaggggatgcccaaacttataaaacaaaggatgaaaagactgagcatcttgaagaaaaggatgccatccaaggctttaaaaactatcttctaaaagaaacagatgcaaataaactgtcagacatcgaacagcgtgtcagcgaatcgattgaaaaagccgtctcgttcagcgaaaagagtccatatccgaaagagtctgagctgttgacagacgtctacgtgtcatatgaaaaagggggaatgtgagatggcgagagtcataagcatgtcggacgcgatcaatgaagcaatgaagcttgcgatgagaaaagacgaaaatgtgcttttgatcggtgaagatgtcgccgggggagcggcggtcgatcacttgcaagatgatgaagcatggggcggtgtattgggggtcacaaaggggctcgtacaggaattcggcagaagcagggtgctggacacaccaatttctgaggctggctacatgggtgcggccatggctgcggcatccacggggctgagaccgattgcggaactgatgtttaacgattttatcggaacgtgctttgaccaagtgatcaaccaaggggcgaaattccgctatatgttcggcggtaaagcgcaagtgccgatcaccgtccgcaccacatacggagccgggttccgggcagccgctcagcattcgcaggcgctgtatggcctgttcaccagcatcccgggtctgaagacgattgtgccgtccaatccatatgacgccaaaggtttgctgctttcggcaatagaagacaatgatccggtattcttttttgaagataaaacgtcctacaacatgaagggcgaggtgccggaagattattatacaattccgctcggaaaagcggatatcaaacgcgaaggcaacgacataacactgtttgcggtcggcaagcaggtcaatactgcgcttgaagcggctgcgcagctttctgagaaaggcatcgacgccgaggtgcttgatccccggagtctgtctcctttagatgaggaagcgattttcacatcgttagaaaaaacaaaccggctgatcatcattgacgaagccaatccgcgctgcagcatcgccacggatattgctgcgattgtcgccgataagggctttgatttgcttgatgcgccgattaaacggattacagcgccgcatacaccagtgccgttttcgccggtgcttgaagatcaatatttgccgacaccagaccaaattgtcagcgtcacgcttgaattgcttggcgagccggcaatgaattaaaggagggatatagaatggctgtaaaagtagtaatgccgaagctgggaatggcgatgaagaaaggtgaagtatccgtctggaataaaaaagtcggcgacccggttgaaaagggagaaagcatcgccagcatcaactcggaaaaaatagaaatggaaatagaagcgcctgaaagcggcacgcttctccatattaaagtcaaagagggagaaggagtcccgccgggaacgcccatctgttatatcggggaaaacggcgaagaagtgcgggagaaggaggcgccggctcctgaaaatgcagggaaaccgcaatctgaacctgaacatattcccgctcccaaagccgtgcaaaagcgtaaacaccgcgtgaaaatatctcccgttgcccgaaaaatggcggagaaagccgggttgaaagttgatacgctgaacgggacggggcccggaggcagaatcgtaaaagctgacgtcatcaaggccatgaagacggaatctgaaccgcagtcttcggttcagacggcacagccggaggaaaaaccggcttcagcgatgagaaaagtaattgcagaccgaatgcacaaaagcctgcaaaacagcgcccagctgacgctgacgatgaaagcgaacattacggagcttgtaaaatggcagcagcagctcgccgacagcgcgaaaaagcggagcggtgttaaactgacggtcacacatttcgtatcccgggccgcggtgcttgcgctgaaacagcatcctgagctgaacagctcttatcaagaggagcggatcatcacctatccatatgtccacctcgggatggcggtttctcttgaaaacggtctcgtcgtgccggtgattcgggatgcggaaaagctttcattccttgagcttgcggatcacatcagcacatcggcacgccgggcgcgggaaggcaatgcttccggagatgatctgcacggatcgacattttctattacaaatctcgggggttacggaattgagcatttcaccccgattcttaatccgcctgaagccggtattctcggagtgggcgcaagctatgaaacgcctgcgtttaaaggagatgagcttgtcaaaagcatcatgctgccgctgagccttacctttgaccacagagtatgtgacggcgcaccggctgcggacttcctgaaaacggtcaaagcgctgcttgaagagccggccggattgattttatagagagggtgaagagattgacactagccattatcggcggcgggcctgccggatatgcagctgccgtgactgccgcgcggaggggagaagaagtcgttctgatcgacaaagggccgctcggaggcacttgtctcaatgagggatgcatcccgacaaagtcgcttttggaaagcgcgaatgtactcgataaaatcaggcacgcagatacattcggcatcgaactgccgcaaaacattacactcaattgggcccgcatgcaggggcgcaaacggcaaatcgtcagccagctcgtgcagggaattcaatacttaatgaaagcaaatcagattaaagtcatcagcgggacagcctcatttctcacagagcagacattgcttgttgaaggagaaggaggcgcaaaagacattctggaagcggatcggatattgattgcatccggatctgaaccggcggagctgccgtttgccccatttgacggcgattgggtgatcgacagcaaagacgcgctttctttacagcaaattccttcttctctgcttattgtcgggggaggtgtgatcggctgtgaatttgcctctttattcagccggtttaaaacgaaagtgacggtgattgaatcggctgaccggctgctcccggcagaagacggagaaatcgccgccgttttcgaagactctttaagagacagcggggctgatattcagacgaaagccgcccttcagcggattgacaaagaaaggaaaaccgcggtgtggacaaaagacggcaaagaaattgaggctcaggctgatcacgttttggttgcaattgggagaaagccgcgtttgcatggcttgaatctggagcaggccggcatccggtattctccgcgcggcattgaagtcaatgaccatatgcagaccaatgtgcctcatatatatgcgtgcggcgatgcggccggaggaatgcagctcgcgcatgccgccattcatgaaggaatcacagccgccgcgcatgcctcgggaaaggacagcaaagtcaatatgcgggcggtgccccgctgtatttatacatcgccggaaatggccgctgtcgggctgacggaaacacaggcgagagaggcatacggagatgtgaaaatcggagaatgctcattttctgctaacggaaaagcgttaattaaacatcagcatggcggcaaaatgaaaatcattgccgaaccggaattcggagaaatcgtcggcgtgtcaatgatcgggccggacgtgacggaattgatcggtcaggcggtcatgatgatgaacggtgaaatgacggctgatatgtcggagcactttatcgcggcgcatccgactctgtcagaaacgcttcaggaagccctgctgaatgtcaccggacttgcggtgcattccgtataaccggaataccctttctcagatgagaaggggtatttttcgttgaaagcgctttatttttcccctacaatatatgaaaagatggtctgaacaggggggagcgaatacaatgaatgtcattcggaatgattttaaaacctggaagcgctttgtgaaagaaggcgtgcttgatgaatcccgtattcagaagcgggtggccgcctcatggcaccgctgcaaaaaagccgacgttaacccttatctcgaaaaggggccgaatgtaatgccggcagatcatttagaaagacaggccgaaaagcatgcgttatttttagcggcctcaacgccgtatgcagaaagaatgaaaacggcgatgcgggaaatggaaatgatggttctcctgattgattcagacggcgttgtccattcagttgacggccacccgcgcaccattcatgaagcgaaccgcatcaatttcttaaaaggcgcccgctggacggaaacagccgtcggcacgaatgcgatcgggacggctctttatacaaatgagccggtcatgatacacggttctgaacattattcgctcgcttctcatcaatggagctgttccgccgcgccgatccgttatgaagacgggcggctggcgggtgtcattgatatttcttgccccgccgcccgcgctcagccgtttatgctcggaattgcctcctccatcgcttatacggcggaacgggagcttgccctaaagatcaaaatgacagaacttgacatgatcagcaagttcgccgggcttacccggtctcacgatccgatcgtgctttgcaatgaaatgagccgggttatcgccgcaagccgtcccgttcagcattttaccggacatatgctgcgcgagcttgaggaacatggctatcacatcaagcaggcgaagcgggaggagaacggcttctcgtgcatttacttatccaaacgagaagaaaagccgtcttttatattccatggtgcggcaggcaaaagcccgtcatcccgacatatgcttcagcagctggagcttgtcgcccgcacggacgcaaccgtttgtcttacgggagaaaccgggacgggaaaggaggttgccgcccgggcgattcataacaacagctccaggaaaaacggcccgtttatcgccgtcaattgcggagcggtccccgaaaagctgattgaaagcgaactgttcggctactcggaaggcgccttcaccggggccaaacggaaaggacataacggcgctttgcaaaaagccgataaaggcacgcttttcctcgatgaaatcggagaaatagcacactccatgcaggtcgctctgttacgggtgctgcaggaacggaaagtcaccccggtcggcgggacaaaagagattcccgttgacatcagaatcatcactgccacccacactgatctgagacagcttgtcgagtgcaaaaagctgagagaagatttattttaccggcttcacgtctgtccgatccacctccctccattaagagaacgcaccgaagacattcccggcctcttccttgaatttcagcgaaatcgcggctggcgcggggagcttcctgatgactttttagacctattaaagagccggaaatggccggggaatatcagggaattgtttaatgtatttgaacgtctttccgtcatgttcccggacggacggctgtcagaacgccccatcgcagccctgcttgaagcgtcaggtcttaaagaggcggccgagtcttatgaacaggaagaagcgccccctgtctccatccgggagcacattcagaaaaacatcatcgtaaacgcgcttgaatcggcgaaggggaatgtcacgctggccgccaaaatggccggaatcccgcggagcacgttttacaaacgtctcaaaaaattcaaactcaccgccggacaattgtaagaaacaagcatacttctcttggctgccggacacgttatgtgtgaggcctaaaggaggtttgagacgtgaatacacagcgtgcgaaagacatttcagaatccgccgccatggcgtatgtgacgtacgaaggagttccgatttatattcagcatgtcaacgaagacaaggaaacagccagaatttttccgatcggaaatccgcaatttgagcaggaagtgctgctttctgatttacaagagcatttttgagaatgggtctgctgatgacagcaggcctttttcgtacctgtgggaactttcccgctttttgagaaaaataactaaaattgattaaatgatctaactcctccaaacccggtacagatcggaccttctcatgatataaataaaatgaaaacgttatcagaggagggcttcacatgacagacaaatcattctcaatcgttattgcaggcggcggcagcacatttacccccggaattgtattaatgcttttgaatcacctggaagagtttccgatcagaaagctgaaactttatgacaatgataaagaaaggcaggagcggattgcgggtgcgtgtgaggtatttataaaagaaaaagcgccggacattgaatttctggcgactgatgacccagagacggcttttacggatgttgactttgtcatggcgcatatccgcgtcggaaaatatgcgatgcgcgcgctcgatgaacaaatcccgctgaagtacggcgtggtcggccaggaaacatgcgggccgggcggaattgcatacggcatgcgctctatcggcggtgttctggagattcttgattatatggaaacgtactcgcccgacgcatggatgctgaattactccaatccggcggcgattgtggccgaagctacacggcgcctcagaccgaattcaaaaatattgaacatctgcgacatgccggtcggaattgaggatcgcatggcgaacatcctcggattatcttcacgaaaagaaatgaacgtccgttactacggtctaaatcactttggctggtggacgtccatcacagaccggcatggcaatgatttaatgccgaagctgaaagagcatgtccgtgaatatggctacgttccgaagacggaggccgaacagactgaagcaagctggaatgacacattcaaaaaagcgcgcgacgtacaggcggctgatccggatacgcttccgaacacatatctgcaatattacttattcccggatgatatggtgaaaaaatcaaacccgaaccatacgagagccaacgaagtcatggaagggcgggaagctttcattttcagccaatgcgatatgattacgcgcgaacaatcgtcggagaacagtgaaattaaaattgatgatcatgcttcctatatcgtcgaccttgcccgggccatcgcttacaacacaggggagagaatgctgttaatcgttgaaaataacggcgcgatcgcaaactttgatccgtcagccatggttgagattccttgtctcgtaggctcaaacggaccggaaccgctctcagtcgggaacataccgcaatttcaaaaaggcctgatggaacagcaggtgtctgttgaaaaactgacggctgaagcgtgggaagagcggtcatttcaaaagctgtggcaggcgctgatcctgtcaaaaacagtgccgaacgcccgtgtggcaagactgattcttgaagatctgatggaggctaacaaggactactggcctgagcttgatgtaagtccgtctcctatttcctgatgacaatcttccccgttttctttatctgttattctatataatagaaagaaaacggggggatttttgggatgagtcttgaagaactggttaatcagcattacgcgaaattaaatgacaacgatttttatattttaaaatatatattgaatcataagcatacgtgctatcatctcggtatcaatgacatggcgaaagcctgcaatgtctctcggtcttccattctgcggctcgcccaaaaactgggcttcagcggctacagtgaattccgggtttttctgaaatgggaggatcagcctgaagagggcgagaatatgacatttgaaaagctactggatgatattgaagccaatgtaaaatatgtgaagtcaaaagatatgacggagatgtgccggctgatagatgaagcaaaacggattttcgtttacggatcggggacggctcagagggtgtgcgcccgtgagctgcagcgaatgtttgtatcccggcggaagtatctgattttaattcaggacatcacagagtttgatatcatgtgtgatgattttaaggttgatgacgtattcatcattatttctttatcaggcgaaacacccgaattaattccgcaggtaaggaccctgtccgcaaagggagttccgtttatttcaatcaccaatctgaaaaacaacgtactggcgcaaacgacgccgtataatctttatgcgaccagcaagccggtgacgttaagcgataaaacggaaatcgtcgcattcgccccgttttttctggtgggcgaagcgttattccgtgcatatgttgattataaagagctcgaaaattttgataaatagcgggaggtcacgtgaaatgatgcaaaaagtccagcgcttcggcagcgcgatgtttgtgcctgttttattatttgcattttccggtattattgtcggtctgagtacgctgtttaaaaataaaacgctgatggggccgctggctgatcctgacgggctttggtatcaatgctggtatgtcattgaacagggcggctggaccgtctttaatcaaatgccgctcctgtttgcgatcggcatacctgtcgccttagcgaaaaaagcgcaggcgcgggcctgtttggaagcgcttacagtttatctaacattcaattactttatcaatgcgattctgacggtttggggcggggcttttcatgtcgatatgactcaggaagcgggcggaacgagcgggctgacgatgatcgccgggatcaaaacgcttgatacgaatattatcggcgccatctttatttcatctattgtcgtgtatttgcacaatcgttattttgataaaaaactgccggattttctggggatttttcaaggatcttcctacatcgttatcatttctttcttcattatgataccgatttcacttgcggtggcatacgtatggccgatggttcagtccggaataggctcgctgcaaagttttctcgtttcttccggggcgatcggcgtgtggatttacacgttcctggagcggattttaattccgaccggcctgcatcattttatttactctccgtttatttacggtccggctgtggctgaaggcggtatcgtcacctattgggcccagcatctcggggaatactctcaaagcgtcaaaccgctgaaagaattgttcccgcaggggggcttcgcgcttcacggcaactcgaaaatcttcggcattccgggaatcgcgctcgctttttacgccacggcttcaaaggaaaagaaaaaaatcgtcgccggccttttgatcccggtcaccttgacgtccattgtcgcgggaattacagagccgattgaatttacattcctttttatctctccgtttttatttgcggttcatgctttgcttgccgcttccatggcaaccgtcatgtatatggccggcgtcgtcggaaatatgggaggcggtttgatcgaagctgcgaccttgaactggatcccgctggcgtcaagccacggcttgacgtatgtataccagatcattatcggattgtgttttaccgctgtttactttttcgtcttccgtttcctcattctcaaattcaacatcgccacaccgggcagagaaaaagaggaagggcaggaaacaaagctctattcgaaaaaggagtacagagaacggaagcaggcttcaaaagaaacagcggcggcagacgaaacacagcgggatacagccgctttgtatattgaagcgctgggcggaaaggacaatattacggagatcaccaactgcgccacccgtctccgcgtcactgtcgctgatgaatcaaaggtcaaaagtgacgccgatttcagagagctgggagcccacggcgtcgtcagaaaaggcagggcgcttcaggtcattgtcggattaggcgttccgcaaatgcgggagcgtgtcgagaaaatattgaacggttaaaatactgcagcagcagattatgtgcagagcgcttgttaatccggcgctctttttatgttttgaagaaatgtatgaatttgtcatacctttgccacctgtacatgcaggagtgaaaatgagagggtgcaaaaaacgaaatgacttctgcggtattttaaatagcaattaacaaataggaggcaagacaatgacaaactatacgactttcttaggactttacaaacccgataaagccgaagggattgaagttgaaagcattgctcaaaactttgaagcgattgacagcaaaatcggtgctgcgcttagcaatggcacgtcaacttatgaaaatttaaacgaaagacttaaaatgtatgaaaacagatttgaacatgtgacagagcggaacgttatggattttggagctaaaggtgacggcgtaacggatgatacgcaggcatttcatgatgccatggccgacggaggttatgtcgtaacagttcccgcgggtgtattcagaacatcgggattgtttgttccttcaaatacaatgcttgtcggagcaggcaagaaaagaacggtcattaaattattagacgaagcaccggtcggccattctgttctgaccaacagtgattatacgaacggtaatgaaaatatttatgtcggccatctcactttggattggaacaaggatacgcgtccttccggctggaagattccgaaaggtcccacttcaagctgtttgctttttgcgaatgttgactattcttttgtcgagcatgtgtttgcgaagaacgccggcctgcacggctttgattctacaagcccgaactataacagacatggagaaaaagatgatccaacttattatcagcccaacggctgtaactttgtaacgttttcacattgtgaagcaacagggtccggggatgataactttacttgtcactttgggaaacacacgactttcagtcattgcctctcttatcatcctatggggctaaacgatggaacttctaacacgaactgttttgaaattgatgacggctctcaagacgtaatgattgatagttgtatctcaattggaggagtccgaggctttgagattaaggcacacggttatgcaccggctgcgaagagagtacagcttgttaactgtcgcgcatacgaaaatgccattggatatagcattcgccatatcggtcaccacacagcaagcgatcctcagtcagcgacagcccatgatgtgcagcttgcgaattgtatcgcatataaccctaagccgaatgatctttacaaaggggcgggtccaaacgcgttgcaaatctccggatatgatggtgtgagtgttgtgaatttccatgctgtttgtgatgatagttcaattgattataagggtaattcggtagtcagcgtattttataaaggacgcttaattagcttaaagaatataaccattcgcggatttaagactgcagacaatgatttatatattgtcggcggggataactcagtagggaaagtaatggtggatggtgtcaccttgattgactccggaaaaaaaggagttgcatttggcagcggaatgtacgagtctgttgttagtaatgtttggggacagagatctccaaaaaataatagcgggacagttggaatttattcctcagatccagatcttaatgtatccaattgtgatttttcaggttatgaaactgactttaacattggaggagcagtcactccttatttcttattcaaacataaaggaagcggggtcattggctcccgtgaatctcacgctacaggcaataataattttgtggctggttctgttcggggaagagcaaccggagcggctcaatcttcagtgctttcttcgtacaatacaattaatccgaattcagattctgtagcacttggctggggtgccggcagcactccgtcatcagccaacagaaaaattgagcttcacgcaaaagaaggaacaattaaggctacgggaggtgtaacaggttcctcgacattctctgactacgccgagtattttgaaagcctgagaggggaaaagattccgacgggaacacttgtcacacttgaaggtgataagatcagaccggctgaaaaaggtgacctcatgcttggggtcatttccgagaccgccggagtgattcttggtgagtcgagttttcactggtcgggacgatacgtaaagaatgaatttggcggctatgtttatgaagaacagaaagatgcgaatggccatacggtcatggcgccaaaggaaaatccggactttcggcctgaagaagactacgcttcaagagaagagagagacgagtggaacattgtcggactcatcggccaggtatatgtcagatgcgatgagactgtgaaagcgggagattttattcacgctcataatgggattgcaacaaaatctgatgctccaaaccagcgctggcaggtcatgaaagtgatcaatgagtttgatgctgataaaggattcggggtcgctctcgtttttattcgttaaatgaaatgacacggtatgaatgatcatctgactagcggacgtcttttaaaggctccgctagtcattttaaaataaaaggctccggttcaggagctggtaaaaagaaaagataagacagtctccatatatctgcacgcctcattcccacaatttttatcctcaatgatatttccgttttttttacacaaagtacataataaaagtgcaggttcaagggttaatcctttattcatttaagacaaacaaataaaataaatatacatacatattgaacaaaggatttggaggcttacacatgtcaaaggctttatcatatgtaaaaccgtattctcttttggcgggaatcgctctgtttttcatgctcatcgagcttgcggtagagctgatacagcccctgctgatcgggaaaatcattgacgaaggaattttaaagcaggatctcggaacggtttggctgtggggcggcgtgatgatcggactgaccgctgtttcattcgcatcgggcattttaaattcattctactccgcccacatcagccagagctatgcgtatgatacgcgaaaagggctttttcaaaaaattcaatccttctcctattcgacgtttgcgcaattctcatccacatcgtttatcacccggctgacaaacgatgtgacacaggttcagaatatgcttttcatgagtctccggtttatgctccgggcgccgttaatgatcgcggggggcattattctctcgctgaccgtcaatgcgaaactcggtttttttctgctgatcacggtgccgattttgcttttgtttttgctgtgggtgctgaaaagaggcggcgcgctgtttcggtctgtgcaaaagcggcttgatcaggtcaacacgatcatgcaggaaaacctgacggcgatcaaactgattaaagcgctcctccgtgcaaaccacgaagtgaaacgttttttgaaatcgaatacgaagctgatggaaaaaacggtctccgcttttcgtctcgtggaagcggcgatgccgattttaatgctgctgatgaacatttgtattttgtttatcttatggttcggcgccaaaagcattgctcagggcggagcgcaggtcggcgatgtcgtttccgtcattaactatgcgacgcggattacaggcgcgctgtccgtccttccttttctcatcatggtattttcccgggcgaaggcttccggagaaagaatcggcgaggtgctggaaacagaaggcggcgagggaacggggcaggacccggcacgggcgcttgcaggcgggattgagtttcgcgaagtgtccttccgctatccgggcatggaaaaagacgcgctgcatcacgtgtccttttctgccagcccaaaagagacggttgccattatgggcgcgacaggctcaggaaaatcaacgctttttcagctgattccgcgcctgtacacggctgattcgggcagtattttcatagacggcaaaccgatcggtgaattctccgcttgcgggctgcgcagggaaatcggctatgttccgcaggaagtgcttctgttttcgggcaccatccgtgaaaatatcgcctgggggcgggaggatgcttcactagatgaagtaatggaagcggccaaagacgcgcaaatccatgacacgattatgaagctgtcaaacggatacgacacggtgctgggacagcggggcgtcaatttgtcaggcgggcagaagcagcggatttccatcgcgcgcgcttttatcagaaagccgtccctcctgctgttagatgacagtacgagcgcgcttgatcttcaaacggaagcgaagcttttacaagcgatcagatcctatgaatgcacgacactgattattacgcagaaaataacgactgcgatgaaggctgacaccatcttattgcttgaagacggagaactgctggccaaaggcacgcacaaagagctgatggcacagtctcatctgtaccggcagatttatgaatcacaattcggaaaggagggagctgacaatgcaaaaagacattcgtaaacctttccgatatccaaaaataccgctcaaatcgaatgaaggcggcagaaaacgcgcgaaagcaaaagatacaaaaggcacgctgcgcagaatctggtcttatgtagccgagaaaaaagggcttttaacccttgtgatcatcatggtagtcataagcgccatattcggcctgctcggaccgttcgtcatcgggaaagcgattgatcattttatcgtcggacagacgacagacggattggcgggggtgctgttcatcctgtttgggatttacctcgtgcaatcattgtccttatggtttcaaaactattggatgatcaatatctcgcaaagcaccgtgtttaaaatgcggagcgagctgtttacccatctgcatgagctgccgattccgttttttgataaacagcggctcggggacttaatgagccgggtcaccaatgatatcgaaaatgtcagctccactttaaatacatccgtcattcaagtgctgtcgagcgtcattacattcgtcggcacaatctccgtcatgctgtacatgagtccgcttttaacattgatcacgcttttgattattccgatcatgcttttgagcattaaatggatcaccaaccggacgggattgctgtttaagcagcagcagaaaaacctcggcgagctgaacggttttattgaagagtcgatatcaggggcgaaggtcattaaagcctattcgagggaagaccgcgtcatggaacaatttttagaaaaaaacgcggcgttacaatcatcggggttttgggcgcagacgatttcgggattcattccgaaagtaatgaactctttaaacaatttaagctttacgattatagcggcggtcggcgggctgtttgcgctgaaggggtggatctcgatcggttccatcgtcgtattcgccgaatattcgcggcagttcacgcgtcctttaaatgatttagccaatcagttcaatacgatgttatcggccatcgccggggctgaacgggtgtttgacgtgcttgatgaaaaggaggagcgggaagatgaagagcatgcgctgtaccagccgatcaaaacgggagagattgaattccgagatgtctccttcggctatcaggaagacagcctgatcttaaaacacctgtccttcagcgttccgaaaggacagtccatcgccttcgtcggaccgaccggagcgggtaaaacaaccgttacgagcctgatcgcccgtttttacgagccgaataacggaaaaatcctcattgacggaacggacatcaaaaaactgacgagatccagtctgagaaaaaacatggggtttgtcctgcaggattcctttctctttcagggcaccatcagggaaaatattcgttacggccgtctggatgcatctgatcaagaggtggaggcagccgcaaaagccgccaatgcccacggattcatcgaacggctcccgaaaggctacgataccgtccttacccaaaacggcgcgggcatcagccaaggacaaaaacagctcatttccatcgcgagagctgtgctggcggacccggtgctgctcattttggatgaagcgacgagcaacattgatacagtgaccgaagtgaaaatacaagaagcgctcggccgtttaatgacgggcagaacaagcgtcatcatcgctcataggctgaacacgattcaaaaagccgatcagattcttgtgctgaaagacggcgaaatggctgaaaaaggaacccacgccgaacttctcagccagaacgggttttaccgggaattatatgaaagccagttccgggaatcgtagatagggaaaaagacctccgacagagtgcggaggtctttttttcgcgaaggcaaatagtacttttaagttattttcgttaaatgtaacaaaattacttgacgtaaataagttatgtatatatactagcttacataaagtaagtgataataattttcaaggaggattttatgaataaatcattcgaaacaggaacactgcttttaagggttgtaacaggtattatcttttttgttcacggtttatccaagtttcaagggttggaaggaactgcgcaatttttccagagcatcgggattccggcctttatggtctatgtcatcgcgacgattgagcttgtcggcggggttctgatctttttcggtttggcaacgcgcattatcggcgttctgtttgccgtcacattagtcggcgccatcttcacggcgaagctttcctcaccatttatgggcggatcggaatttgatttcatcttactggttgcgtcaattcacttagcgctttcaggaagccgtctgctttcattggatcagctccttttcaaatcaaaaaagggagaaactttttcagcataagaaagaaggcgttcaaatgaccggcattcatcaagatacggcaatcggttatgtcaaattgaccattaaaaatatggaacgctcgctcggcttttaccggaatgtaatcggccttcaagtcatctcgcagacagatcgttcagcaagactgtcagcagacggaaaacgcgtcctgctggtgcttgaagaaaatccaggcgccgtcgttctgccggagcggtctgtcaccggcctttaccatttcgcgatacttttgcctgaccggaaagaactcggcatcgcattggccaggctgattgaaaacggcatcgcgctcggtcagggggatcacgcggtcagtgaagctctttacctgtctgatccggacggcaacggtattgaaatatacgccgatcgtccccgcagcacgtggcgccgggatgcagagggcaattatgtcatgcaaacggcgcccgtcgatgtggacgggcttttggaagaagccggagctgaacggaaaagccgtctcccagaaggaaccgtaatcggtcacatccatcttcatgtgacggatttacaggaagccaaagcgttttacaccgatatcctcggttttgacattgtcggcaattacgcgggcatgtccgctctgtttgtttcggcgggagggtatcaccatcacatcggtctgaatatatgggccggaaaacatgcgccgccgaaaccgggaaacgcaagcgggctggattattacaccatcgcgctgccgcatcaagaagagctgtcacgtgtgacaaaagcgctgaccgatgccggctttgagatcgaagaaaaagaagagggcgtattcgtcaaagaccctgtatcaggggcggatatcgcatttacactgtaagaaacaaaccttgccgtctaaccggcaaggttttttatttttctgaagttttcttgggaaggttcgggaaagaagaacgtcgatttgcaatatacacacggcttttgtgtgactaaagagagcgaacatctcagtgaggcgcaaaaatgacgcgtggagccgccatcgccggcccgagctcagagcatccgccggattgaaaaagctgtatgggcaggatttgaatagaaaaaggcaaaagccgcatccggtcacaagatgcggctttttatacacaatttacaattgtgtgaaaaatgctcaaaataaattgtgcttcctgattcttcctgatatgataagccgaaaaaggagaacctgaacaaatgaactcaaatgcagcacagacggaacagccgatgaaacataacggaaaccggatgacggtcaaggactttatcattcttgccaaaccggggattatcatctcaaattcactcgccgcattgggcggattttggatcgcatggattcagtcagaaaggacgggcggagggcccgggatatttgccgccatggcggttgccatgatcggaacggcgttggtcatggcatcaagcactgtttttaataacttttttgaccgcggcatggacgcaaaaatggcgcgaacccgcacccgcgccagcgtcacgggaaaaataccgccgccggtcatgatcctgtacggcacatgtctcggcgcatgcggattcatcatgcttgcttcgcttaatgtactgaccgccgttcttggcttgcttgcatttttgctgtatgccgtcgtttatacgctttggtttaaaagacaatccgtctggagcacatttgtcggcagttttcccggggcggctccgcctttaatcggttattgcgcgctgaccgggtacattgatatgcccgcgattttgttatacgcgattatgtttttgtggcagccgccgcatttctgggcgattggaatcaggcgaaaggaagagtatcgtgccgcaggcattccgcttttgccgatcataaaaggcaaccgcgccacaaaaataaaaatgctgcgctatatcgccgttctgactgcggtttcgctgctcgttcctctttatatagacgtcagcccgttttataccgcgtccgctctcctgctcggagccatctggctgtaccggagcgtcaaaggctttcaggcggcggatgacacgcaatggtcgaaggggatgtttttttattcgattgtgtatttcagtctgctttttcttattttaatggctgattcgtttatcaatgcggttctcagaacgtaaacaggcggcttgcagatacagagccgccccgttttgtttatgcttttttgatgagagccaaaatatcttcaagccaggaaatataattccgttcccgctcaagcgcttttgtcagcacgagataatggccgaaatcaggagaagaaaaagaatccgcctccgcggacgatgtcatcagttcttgataactgttttccagatcggacaatttctccttccgctttacgagctgatcggtgaatagctcatccgcttcttcctgcgtcaaagctgagatgaaataagccttcagcataaattcatccttgaccgtttccggaatcgggtcttttttcgtcagccaggcagcaagctccagatctcccttgtcagtcagcgtgtacatttttttctcaagcttcgttccttgaatcgcagtgcgaaacgtaataaatccctcagccgtcagtttttttaattccggataaatctggctgtgctttgcgctccaaaactggccgagctcttctttaaaatagctcgatatatcatatccgctcaattcgccttttcgcaaaagccctaaaatcgcgtactttaaaattctcatgttgccctccaagccattcatttgacagctagtataccatacggccgctcaaaaacgcagaagtgccggatgcttgtaattgaatctgcggcggcaaaatcagcgaaaatatgcagaaaggggttatcgaaacggcagcagaactggaaaaagcctttctcatgtctttgcctcattcatatgacaacatgatataatcattgtaaaaattaagaaataatgggagggacatatgaagacggtgattgtgtatgcaaacccggatgagaacagtttcaatgcggctctcgtaaaatacgtcgtcatggctttaaaggacagcggccaaagctatacggtcattgacttatacgccgaccaatttgatcccgtgctgaagtacggcggcgaaaaaaagcgctctgacatgaaccgggacgctgaaacgaagaaataccggaaactgatgaaagaagcggatcatctcattttcatctacccgctgtggtggggaggcgttccggcgattatgaaaggcttttttgacagagtgcttgtcgccggagaagcctacacatatgaaaacggccgcgtaaaaggactgctccgggcagagacggcacaggtcttttatacggcggattccccgggctggtacttaaagtggttccggaaaaactcggactggattacgctgaaaaaaggcattctgcaattttgcggcattcaaaaagccgagcggaaccttttttctgtcgtcaaaacgagcacacccgagctgcgggaaaaatggctgcgccaagcatacgctaaagtccggcgcgcttgtgaaaaaggagcggccgcatgcagataaaagaaattttcgtgattcgctgcctgtcctgtttaagtgtggttctgcttcacgtagtttcaatggtgctgatgattcaggaagagtccttagccagtgccgcccatacggttgatgcttttcggaccctgttgatgttcagcacgccggcgtttatctttatttcggaatttctgcttgccaggtcatacccgggaggcgttcccgcgggttttttaaagaaaaggggcaaagtcattttcgtgccgtttctgtttattgccgcggtggatgccattttaatgaaaagcgtggcggaagaaggagccggcttcgtttcagtgatcggtaaatttttagaaaatgtgtttttaggaaacttcatcggctacttcattcttgtgatctttcaattttacattctccatatgctgctgcaccgctggctgaacaacaaatctcccatgtgggtgctgtctgtgtcgtttatcatcaacgccgtctatctggcttacttttccatctttcatccgccggcatcatcggggcttgattctatttttccgttcttttgggttccgtttccgggctgggtgttttatttctgtctggcattttattgcggaaaggaatatccgcgttttttatcgctaatcaatcagtaccgttatgcggtttacttcagtgcggccgtatcggcactattgattgtggccgtttcatatatcagcggcggctccatttcctctaagcgtccggatattatgatttacgcggtcagtatgatctttctgtgttttcatctgttttcaaagctcaaaaaagtgcccgcgattgtgatgatgatcagcaactattcgttttcaatctatctgctgcactcctactttttaatcagcggatatcttctggaaggctatttgcgatcaatgcctttgccggctgccatccttcttttatttttgatctgcacgctcggtcccattttcgtatcttgggtgtgcaaccatttcagatacggatacctgtttgtcgggaaagtgtatcagccgaagcagaccaaaagaaatacggcggcgcatcaaggccgcacagtctgaaaaaaaggcggcgtttcagccgccttttttgatacggaagttgtacataacctgcaaacgaaaccccccgcggcaagccggaagcgaatgccaggcaagcagtatcgggcagcctatctctaattttaatagcgctttcactgtaaggctgaagaccacgctgcggccgttttgacggatgcatttatgacaacataacgccatcgattttctcccttgtgaagaccgatatattgtatacttataggaaatactttcaaaaaaagtgaaaaagagaaaaactgtgagcttggatgaacgactaaaaaggagcggggacattatgaatgactgtgtcaaaacattcggagaacttccggacgaactttattcctttgcgggaggaaaaggaagcattctctctaaaatgtatcaaagcgggtatcctgtgcctgaagggtttgtgattttgccgtctgcctttcaggacggacagctgcgccatcaggcgagagaggctgttgatcaatatgtgaaatccatccgcagccgccatgcatctgcgttgtttgccgtacgatcatccgcgctgagcgaggattccgctcaggcttcctttgccggagaattcgatacggtgttgaatgtcaaaacagatcaagatatgtccagggcgattgatgaagtccgccgatcggcacagtcagaaagggtaaaagcgtacagcgccgttcagggaatggaagatgagcatgaaatcgcaatcgtcatccagctgatgataccgtctgagatatccggagtgctgtttaccgcagatccgattacggggagcaggcgggagatgacaggcaattacgtctacggtctcggggagcagctcgtttccggggaagccgatgcctattcttttaaactggcacggcctaagaaaaaatatgacggccccggggaatttcgcaaatatgcgtcaaagctctataaactggcgaaaaagctggaaaaagatctcggagggccgcaggatattgaatgggccgccgcgggcgggacattgtatattcttcaatcccgcccgattacgaccttacaagccggaaatctggaaacctatgaatggaatgattctttcagcggtgattttttatggacaaacacaaatataggagaagcgattcccgatgtgatgacgccgctgacatggtcgctcctccggaatctggatgaagagtcgggcatcattccgggctattatgtctggtccggcaatatttgcggcagagcctataacaatatgagccagcctctttccgttctcgccgctttcggtctgaatccgaaaggcggaaaaataggaaaaatgatgagcgatacattgggagaaatcccggcggaaatgaaaattcccttatatccgttctcaaagtatgaacttttgaagatcatctcgaaaaaactgaaaccgtatctgtcgaaaatgaagcacgcgaaaaaaaacatgtcctcctacttggacgaatcgccggagtggtgccggaatattgaggaaaagctgaaacgggccgaaacggagcggacattattagcgatatggaacaatgagatctatccgtatttatgcaacgcgtggtttgcgttaatatccggcgggcgtgattctgcgcaatcctcttcgtcgttaacctctcaattaacaaaactcgcagggatagaagatgcgaatctcctgctctccaatctgaggggaaaaggcggcctggccagcctggagccgattatcggcattgatcaagtcatgaaaggccgtatgagcgaggaagaatatctcaggaaccaaggccaccgtggcccgcatgaatacgaactttccataccgcatccgggagaaaaccgggattggctgacgaagcagatcaaagaacacaaggagtcgggtattgatgccgaacaactgcttttgaaacagcagcgggcgcatgaacaggccttccgaagatttgaagaaaagtttcctcataaggtcaaatggctcaaagccaaaatggaaaaagcgtcagaatacgcgaatattagagaaacaaccagatccgaatttgtcagggtgtaccggacagccagagcattcgcgctcagagcggcggaaatgaccggcatgaaggacgatattttcttcttgtatctgcatgaaataaccgatctgctcgcggggaaagagccggcggttgcgtcgattcaagcgagaaagcaaaactatgaaacctataaaaaactgccgccgttcccatccgttattaacggaaggttcaatccgtttaaatgggctgaggatcctgacagaagagcggattattacgatgcttttatgcctgcggaaactgatgatgcgcatactttaaaaggtttcgcgggagcggccgggagagtggagggcattgtccgtgtccttgatgctccggaagacggggattcttttgcggcgggggaaattttagtgacgtcgacaaccaatgtaggctggaccccgctttttccaagagcggctgctatcataacggacgtcggcgcccctttgtcccacgcggcgatcgttgcccgggaactgggaattcctgccgttgtcgggtgcggaaatgcaacgtcaaaactgaaaacgggggacagggtggccgttgacggcgggcaaggcattgtccagctggaaccgcggcagactccggtcacttctgaagaggaaaatggtaaactgatagaataaaaacatgggaaaggagccgcgcatgaataaagcagttattaatggggagcaaatcagaagtatgagcgacctgcaccagacattgaaaaaggaacttgcccttcctgaatactacggtgaaaaccttgacgctttatgggattgtctgaccggctgggtggaataccccctcgttttagaatggagacagtttgaacaaagcaagcagcttacagaaaatggcgccgagagtgtgcttcaggtctttcgtgaagcgaaagcggaaggctgcgacatcaccatcatactttcataatacgatcaacgggagagggacaaaaatggaaaaacaaatcctcagctatccgattggagagtatcagccggctgaatcgatttcggccggacagaaacaagaatggatcaatacgctcgaacacgctccggccaaactgaaacaagctgtcagagcgatgtcggacagtcagcttgatacgccgtaccgcgaagggggatggactgtccgccaagtggttcaccatctggcggacagccacatgaacggctatacccggtttaaattgagcttaacggagaatgaaccggaaatccgtccttatgatgaaaaaggctgggccgatcttcatgattccaaaactgccgcttgcggggatgcgcttgagctgttaacgatcctgcacagaagatgggccgctcttttgcgctccatgacggaagcccaattcaaacggacatacttccatcctgtatctaaagagacggttacgctggaacaagcgctcgggctatatgtttggcactctgaacatcacatcgcccatattactgagctttcccggcggatgggctggcatctgtcttagaggatgccggcttccggaaatacgccaaaaccgccgcagacacaatcgtgcataatgaaatgacggcggctgccgtataaagatggtggtagccgctggaaatgcccgcttcaattgcatcagaaaccgcttttttgacggcgggaacggggattcggcttacctgctcctgcaacgaagaaagtccgccgccgatatcgggcatttgcgcctgatcagcgggaatgccgcttttcgctaaacggtttttgatgtcatctccgatccggtcaaagcccgctgtaatgaagccggcatataaagccggagcgagcgtcagcccgacctgccttacgagtgacagcgtgccgagcgctgttcctttgttttggcccgccgtttctgatacaagcacattcagcggagccccgagcagaaatccgaaaccgatccccgcaatgacactcgctgtgacaaattcccatttatccgtcacccataacggaaacaggctgaagccggcaaatgcgatggcgcctgatacaaccgcggaaaagaccggcccttttttatccgtgatcgccccgccgagccacgctccgatgcctgacgccaacgcgagcggcgtcatccaataacccgctttctccgccgatacgtgcaaatattgctccgcataagaaggaataaaaatgaccgcagcgagcagccctcccgataaaaatccgatgacgagcgtccattgaaacactttattttgcagcagcgagtaggcgagaatcggatcgccccctcggttttcaacccgcttttcgaccttaagcagcaccagaaagagaagtgcagctcccaaaagatacccgtatacctttacgtccattatgctttctgacagcttcgccccatcgagattcgtgataccgatcatacaagataagatcgcaagagacagcagcattgtgccggcgaggtcaagccgtttcgcctcaggctctttcgtttcagcgataaacaaaccgccgcacacaaccaaagcggcggcaatcggcaggttaatcaagaacagccaatgccacgatccggttacatcaagcaaaaagctcccgatattcggtccgaggacggccgccataccgttcatcgcccctaaaagcccgagagctttcccttgtttctccttcggaagcacggccagcacatgcgaactcccgataataaaaattccgccgccgccaagcgcctgaatgagccgtgccgccaaaaacatcgggaagctctgactgagtgcgacaagcaaagagccgagtccgaacagcccgacttcaatcataaacagctttttccgcccgtatcggtccgacagcttgccgacaatcggcacactgacactgagtcccaatgtgtaaagggtcactccccacgatccccatgaaggagaaacatcaaaagagctgttaatcgtcgtcagagcagcggaaataattccgttgtccagcgccgccatgaacacaccgatcgtaaagagagtgatggcccggctctggttttttactgtttgcaatggctccggcatactgatcaatcctcctgtttttaattcacttcgaatatattattcacttcaagtgaattaaatgtcaaacaaaaaaaggccgccgataccggcaggcctttttcatctctatccctgtttggaagaatcaagcgctcttgccaaaatggcaagcccttgattgaccgtttgtttttcttcagcggtcagtgtttccaatgaacgcttcaattttacatgtcctttttgataaaggctgcggaaaatatctttcgcgttttccgttaattgaacgacgactgaacggcggtcttcttctgacggagcgcgtgtaatgaaacatgatttttctaaacggtcaagcagccccgtcgtatttgaaagggaagcgcccattttctccgctatgtcactcaccttaagcgtcccgtggttgttcagaagcatcagcaccttcatttgcggcatgctcatatcaagcttcatccactccgacacatcgccgagccccgccgatgtcatcactttcatgtacagcacccaaatatcccgttcctcaggagaaaaaatatcgccgcttaatactgttgtatcatgcagattataatccatcgtctcacttcctcatttatactcctgcataccatattactgattttaatcagagaaagaaagttgcagacgagttttgtttgaatgtgaggtggtagtgtataatatgttggagattattgggggaattataataaataagctattttatgatgattggagagaacattgctgactaaaaagaatgccttatcgatattaaaagtattatttcctattgcagttttgcttttagtcatttatcagtccaaaaaggaattgacagacctttcttttaaacgaacgctgtacattattaacgggattgagcgttacgatttatttattctcgttctgctcggccttcttgccgtcagcgcaatgtccttttatgactttgtgctgaaacggacgcttcgcctcaacattccgaattggaaagtattcagggtctcctttatcgccaattcctttaacaatgtccttggattcggcggtctggcgggtgtcgggctgcggacgatgctatacaaagaacatacgaatgacgtaaaacgcctcgtcgcaggcatcgcctggcttacgtcctcagcgctgctcgggctgtccgtcttcagtatcctgaccatcgcccgggttctgccggttggagagattacgggtgagaaaccgtggctgtgggctgttatcgccggagtggcgcttatagtgccggcagccttaatcgccgctgggatcaacaataaaaaagctggcgcagaagacggtgaagcaaaaccgaggcatccggttttttcttacatcggggcatcgtttgctgaatggtttgcggcggccgtcgtcatgtattattccctgtatgtcatggggattcacgcggatgtccgccatgtattcggtgtatttgccattgccgctatcgggggaatcatcagtcttgtgccgggaggattcggttcgtttgaccttctgtttctgctcggcatgcagaatatgggctttccgcaggaggcggttgtgacatccatcgtcatctaccggattgtgtattcatttattccgtttgtgttcgggctgttctttgcggctggcgatttaacggaaaatacgcttaaacggctggaatcaaatccgaagatggcgcctgccgtggaaacgacgaacgtgcttctcgtattccagcgcgctatcttaatcagggtgctttacggttcgctgtcgcttttggttttcatggcgggagtcgtcgtgctggcgtccgtcgccctgccgattgacagggagacggtcatcccgcatattccgcgcccggcgctccttgcgtttaacgcgttatcgttaagcgcggctttgattcttttaatcttgccgattgaattatacaaacggacgaaacgttcttattcaatggcggttgccgcgctggtcggcggttttgtgttcagtttcttaaaaggattgaacatcagcgcgatctttattctgcctgtcgtcatcgtattgcttgtgctgttaaagcggcagtttatcagagagcaggcttcgtatacgctcggccagatgatttttgcggccgctctgtttattatcgccttgtttaactacaatctcattgccggctttatttgggataaaatgaatcggctgctgcgccacgattatttcgtccataacaattcgcacattacatatgccacgatgacggccattattgttgtgccgctgtttttccttttgtttacgttcttttatcataaaagatcgaagccgatcggagaagaggccgatcctgaacggctgaagtcctttttggcggaagaaggcggaaatgcgctcagccatctcggctttctcggggataagcggttttatttctcaagcgacggcaaagcgcttttattgttcagccagatttccagaaggcttgtcgtgctcggtgatccgtcaggacagagagactcttttccgcttgtgattgaggaatttctgaatgaagcgcataagcaggggctgagtgtcatgttttatcagatcgaacgtgaagatctggcgctgtaccatgacttcggctataacttcttcaagcttggagaagaagcgttcgtggatatggaggcctttacgctctcaggtaagaaaaaagcggggctgcgggcgattaacaacaaatttgaccgcgaaggctacacatttcatgtcggggaaccgccgttttcctccgagtttatcgccaagctgaaagacatttcggacgaatggctcggaccgaaaaaagagaaaggtttttctctcggtttcttcgaccgggattatttggaacaggcgccgattgcttacgtgaaagacgcggaaggggagatcatcgcttttgccaacctgatgccgatgtatcaggaaggcgagatatccgtcgacttgatgcgttatcggaaaagcgcgccgaacggtattatggacgcgcttttcatccgtctgtttctctgggcgcaggaaaaaggctatactaccttcaatatgggcatggcgcctttgtcaaacgtaggaacggcttttacttctttctggtcggaaagaatcgcggccgtcatcttcaacaacgtccggtatatgtacagcttcagcgggctgcgggcctttaaagaaaaatacaaaccggagtggcgcgggaaatacttggcgtaccgcaaaaacagatcgctgtccgtcacgatgatcctcgtcacccgcctgatcggaaaaaccaaaaaaagacgccgttaaaaggcgtcttttttttgaataattgactaaaaattctaatttcactctgttatactgaataacatgatcataaggtgaaaggatggctgatgaatgaaacaggcaaccgtgtttaaatatgaagcgttttccgatattccggatttgggaaatcccgcgggaatcgtctttaacggagatgattattcagatgaagagatgcagatgatcgccgaaatggcagggtacaatgaaacctcatttctctgtaaaagcggagaagccgatctgcgcatccgctattttacacccggccacgaaatgaatttatgcggacatgctaccgtcgcctctctttacgcattaattgaaaagggaaggcttcaggctgatcagacatatcaaattgaaacaaaagccggcattcttcccgcaaaagccgctgaacgaaacggccgggtatacatcacactcgaacaggctcccccgcaatttctgccgtttacgggtgacaaagaaaagcttgccgcctcgctcgggattacggctgaggattttcacagcgggctgccgattgtttacggatcaacggggatctggacactgattgttccgctgagatcacttaaagcatcacggaatatggtgccggacaacgcacaatttcccgctattttgcgcgatcttccgaaagcgagcgttcatccgttttctctggaaaccgtccatccggaaagtgatctgcacggacgccatttttcttcccctttctccggaacgaccgaagatcccgtcacgggaaccgcttcaggcgtcatggcagcctatatgcggcaatacggaggctccgaagccgaatgcctcacgattgaacaaggccaggaaatcgggaaagacggaaaagtggaaatcaggatcacggaggaaaacggagagatgaacatcaagatgacgggaacggccgtgtatgccgaaacaatcaattttcagcttccgtaacggtttacaaaagccggtcgtatccgttatattataaatgataatcattttcatttggataggaaggtgaatcggcatgccgaaaaccgaacaattacagcaaaacgaaagtcttgcacatacaatcagaaacagaagatccatccggtcgtttaaaccggaaaccgtaccttctgaagtcatattagatatgcttgaaacggccgtttacgcaccgaaccacagactgacggagccatggcgttttatctacgcagcaagcgaagcgggaaaagcaaagcttgcggacagctacgtctcatttttcaaaaagataaaagatgatttcaacgaggaaaaagagcggaacatgagaaaaaacctcagcgccgttccgggatttttgctggtcgtcttaaaagaagatgaaaatgaatttacgagaaacgatgattttgcggcgctgagcggcatgattcaaaaccttcagctcctcgcacatgaaaacggcatcggcatggtctggaaaagcggccgcattatgtatgacaaacaggtgcatcaagacttcggccttgctgacaatgagcgctttgccgccatcattcaaacgggctatccggatgaacagcctaaggcgaaagaacggacgccggcaaaaaacctgtttaccgaactgtaaaaaaaatccccgtctctatacagaggcggggatttcgtattagcgggttttgcttttagctctgttgtcagcggctttcatccgcgcctgcgcttcacggtcagcggagtcagcaagctcgcttgaatattcctcatatgtgccgtctgtttcgcgtttcaaagcatccggaacttgaggaagtttttgtttgtttttatcacggtttttgtgagtatgatttctgcccatatcaatcgccccctgaaaaaagtgatatcaaacaaacatagtatctgcccaatcccgatctttattcagtttatttccgtttggctgctctttccgcttttttgaattcaccggaataaaggacttcctgcatttttttcagattggctccctgctgatgtttttcgcgcttcttttccataaaagaagaccctccttcaaaacagaataccaataggattggcttttatttccgtttttatgcagataagagatcctttaaagcggaatcaagttcttcatacgtaaattgaaaaccggatgtcagcgcctgcttaggcagggcgcgctggccttttacgatcaacaggctcatttctcccaaggccttctccagaaaaagttccggtacgggaatccaatgggggcggtgcaggacgcctgcgatcgtctttccgaattgcttcatttccacggggttcggcgatgtcacattcatgggaccggacaagtcatcatgctccgccgcaaaagcgatgagttccgcggcgtcatccacatgaacccatgacagccactgccgtccagagccgatggtgccgccggctaacagcttataagggagaaccatgagcggcagggcgcctttttcaccgagcatcaccccgaatctggcatataccgtccggatgccgagcgcttcaattttctggccttcacgttcccacatatgagccgtatgactgagaaaatcttcatttgacgtatctgactgttcggtgaacgttttttctgtgcttgtgccgtaaatgccgacggcgctggcctgaatcaaagcccggggttttttcggctgctgcttcataatccgtctgacttctctcgtcgcttctattctgcttgagatgatttgttccttcgttgtgtccgtccagcggtcaaagatggatttgccggcgaggttcacccatacatcaatagggggaagctcgcgctcaggcgccgcgttttcggccagccattgaacatatgtcacatttttttgttcggtttctctctgttttcttgataaaatatagacatgatgtccccggcgggtaaacacacctgtcagatgccggcccagaaaaccagtgccgcctgtcatcgcgatattcatatccatctctccttacacgttgatacatatactgtacctcatttgccaaaaagaaaaacgcctgaacatcggggcgggaaaggagaccgggatgccctttattacaaaaatatcgacccaaaagaaaaataccgagcgcttcaacatctttcttgatgagaaatatgcattcagcgtcgacgccgacgtgcttgtgcgttttgacctgaaaaaagggaaagaactggacgagcttgacattcttgaaatccagtacggcgatgacgtgaaaaaagcctttaaccgcgccgtagaatttttatcataccggatgcgctctgaaaaagaagtccgggatcatctgaagaaaaaagaaacaccggacatggtcatttctgaagtcatccataaactgtacgattacagctacttaaatgacaaagaatttgccgaagcctatgcgagcacccacaaaaaaacaaacggcaaaggccctgacgtcctgttccgcgagctgaaagcgaaaggaatagacgacgataccatcaaggagacgctcagtgcgtttacatttgatgagcagatacaagaagcgctgaaacatatcggcaaaatcctgaaaaaagacaaaaagctgtccacaaaagagatcagacagcgggcgcagatgcagcttcagcgaaaaggtttccctttcgacgtcatcaatgccgctctggagcagacggagtatgaaaatgatgatgaagccgagatggaagctctgaaggctcatgcggaaaaagcgatcaggaaataccgttatgacggcagttatgaaagcggaatgaaggttaaacagtacttattcagaaaaggattctcgattgacgatattgatcaattcttgcaggaagaggagtaaactgaaatggacaaacgatacagtcaaatgacgtctcatgaactacagacagaaattgcgggactgacggaaaaagcgcgaaaagcggaacagatgggcattgtaaatgaactggccgtgcttgaacggaaaattacgatggccaaagcttacatgctgaacccggaagactttcggcccggcggggtgtatcagatagaaggttctgatgacactttccgcattgattacatcaacggcgtattcgcctggggacacagatcttccccgtctgacggggaagaagcactgccgatttccgttttaaaagaaaaaaaataacaaaagaggccggttccggcctctttttcttttcgggcacattcgtttcatactttcagtaaaaaatgattgaattcatttttgatatcttttaagatggaattcgttgttttttaataaaaaggaggcgatttgcgttgaatatcaaaatgaaacagccatcagtgaaattaatgatttttgttttaatgatttgcacattttccatcgggtatacggaatatgctgtcatgggtattctgacgtcgattgccgatgactttcatatacatgtatcttcagcgggcatgcttgttacggcgtacgcggcgagcgtctgcctgacgggcccgatcgtaaccattatcgcggttaagctgccaagaaagccggtgctgctagggttaatgggcatcttcgtccttgccaacctgatgagcgtctttgcgccgaacttcgccgtgctggcgatttccagaattttatccgcatccatccacggagctttttttgcgatcgccatggtgtttgcgagtgaaatggtgccgcctgaaaaacgttccgccgccgcggcttccatgaacggcggattaaccgtggcgctgatgctcggtgtcccgttcggctcttatttaggggatgcccttaactggcgggccgtctttttcattatttccgttttaggcatgatcgggctgatcggactgatgctggtcgtaccgaaccggaaaccgaaagtgattccgatgctgatgaatgaatggagtgtctttaagcataaacaagtgattttttcctttgcgatcaccattctcggctactcaggcgtatttatcgcttacacgtttattgagccgattttaagagattcagcggggttcggcacagtcggcatcacaggtgcgttatttgcctacggtctcggcggagtggcggggaatttcttcgcggggaaagtgccgctcaaactgctgacacgcacgatgatcggtgtgatgatcggcttgatcggcgtcttggcgattttcccttatatcgctgtttttcccgccgccgccgtttcagcgacatttttattcggcgcatgtgcgttcggcacgccgccgcttttgcagaccaaggttatttcttcctcagaaaacggcacgacaatcgccgctgcggtgagcgtttccgcctttaacctggcaaacgcgctcggcgcctggatcggcggattgattctcgggggaacgggatcttactcatggctgtttgccggcggtgcgctgatgacggctctcggccttgtgctttccacgttcgctcatctgtctgagaagaaagatgtctatgaataccaagtgcataaaggataacaaaaagcttgcaggggatattccgcctgcaagcttttttcagtgcttcaatgtaatgctgatcaccgtatgtttatcactctcagctaaggacatattccgggtttccggtactccgtctttttcaaaaacgacggcataggttcctttcgcgccgcttttccatgcaatctcgccgtggtgatcagtcttgcctattatctctccgcggtctatattcggctgatgatctgactccgccgctttcatcacggtgaccgtcacaccggccgccggtgaaccgtctgcatcctcaacatggagcgtaacgggcaatgcttttttggcggcggaatcgtccgctttgccgcatccgcataaaacggccgccgcgagaaagaaaacaaaagctttattgatttgaccaatattgaatgttgtcgaatacactgtttgtcacccttgttcccagattgtaagacgacccgccgtttgtatgaatggcaatggcggtctggccggtgtcgctgtaattgcggtaaacgggcgatccgctctggcagccgaacgtatctgtcgtgtaagtgagtttatatgtctcggcagaacgaatcggcttgctgtccgaccacatggaaccggacactttgtcgcacggatatcctgtcacggttgaggaaagcccggccggactggaactgttggtcgtccggtagccgtaccagccgacggtattcccgggcgacccgtttactttgattgcgccgtagtcgtagtttgtgtcaccgttttctgtccaccctttgacactgtagaatgtcttgcctgaataagagccgtacgggtacgatgatccgttgcggccgggagctgccgtaattttcgatgcccagccgtttttctggtcatacacgcaatgtcccgccgtaacgatcgtgtcggcattgacaaaaaaaccggtgcatccgtaggtgcttgtgctgccgctgtatgtaacggtcagctgtgctgtcgctcgatatggaaatgatgttgtaggagaaattctgattcgttcgtctgtcccaataatactggaaggctttaatgacttgatgtcagctttgctgttttgtgcaagctgtcttttggtgaggcccgttccttcataagcgggggatgtctgtgttgtttgtacaggctgattctgatgtgcgtcaaactcctcaccgctgtttgatacagatgtctgcgggctgcccgctgcttcagctgaaacagcaaataatgaaactgacagtaagaatgcggtaaggctcagcaatcgttttgaaactgtcttcattttataaaacccctccttttttgtctaccggctttcgttttaacatttaacatattatggaatttatttagcgttatgaccgcaaaaggatgtttttttccgcaaaaaaaaaagaccgggtcattcccggtctcttacggtgtgtgtgttatcgtctgcctgaagctctcatgcgttcttgcgggtgcgaattaattgaaccgtccgcccgtttagaagcgtagtcatcctttgcccgcggttcgccttcaaacttattattgttctgattaggaaatccttttgccttgttccggaccatttgttttccccctcggccaatatcaaaaggttgcgccttctggactgaagacgtaaagttagtatatgcctgtgacaagctgcgtaaaagcagcaggttttcccaaggaaaggagacagagacatgaatacatatatcgacaaactgacgaatttgctgcttgagaaaaatgacatgctcagctatttgcaagcgcgaacttgggttgagcttttatggggagatttcgaagcgacttacgcaaaagccggccgcccgtatcaaggagagcaaatgacagaacgcgtcgtcaaggaatggatcgaatcatacggcagcaagctccatatgttccagagcgttcgggaagacgtttctcattatttggatcaaagcaggggtctcctgcattaacatagcagttcgcccgccggatacaagtccggcggtttttactttttataaaagaaatagaaaaatcatgtttggcgaccggcggaatgtggaaatgtgtaataacttataaaatagcggggaggaaccacaatgaacatgaaaaaggggttaaccgcatttattccggccgcaggactttgtttatttttagccgcaggcaccgtttttttcgatccggcagcgaatgccgcagcagttcaccagacaaaaatagacaccgcagcagatacatatatcgtgaaagcaggagaacttaacgtccgcaaagaaccaaataaacaagggtcgattatcggcacgcttcgttcagaggattccgtaaaggttaaacggcttcaaggagcagattgggctgagattgactacaaagggcacaaagcctatatctccacacattttctgatgaagcagccggtgaaggcggtgacggcgaaacaaaccgctttttatacgccgactttggaaaccggcaaaaaagggtccgttaaagcgggtgaaaccgtcaatgtgctcggctgggggttcagccatgacggaggatttgaccgtaaatgggcgtacgtcacatacggcgggaaagcaggttatgtgaaaacggccgacttaactcaaaaataaagattcaggcaggcgaatgagcctgctttttttctgaaaccttccgtctttcctttcgtaaaagatgaaaaggagagtgacggatatgataatggtaatcggcggccttctgatggctgcggccggcatttcagtcacattttttccgccgaagtcgatcaacagtctgtacggatatcggacgaagcgctctatggcggatgagtcgcagtggaaagaaggcaatcgattcagtgcgctcctcatgattttgttcggccttatatcggcggcagctggatttgcgggcagcctgcttatccggctgactcagccgttcgccctgatcgttcaggccgtattattgattgcgatcagcgtactgatcatcgtcttaacagaaagaagattgaaacaaaaggggaggagaatcgatgaatgacattacgtttcacatgatcgaaacaaacggagtgacgctgcacacggcttcagccggtccgaaagacggtcctttggcggtgctgctgcacgggtttccggaattctggtacggctggaaaagccagatcaaaccgctggcggatgccggataccatgttgtcgtgcctgatcagcgcggctataatctcagtgacaaaccggagggcattgaaaactataccattgatacgctcagagacgacattatcgggctgatcactcattttacagatgacaaagccgtcgtcatcggacacgattggggaggagccgtggcctggcatttggcatccacgcggccgcaatacgttgaaaaattgatcacggtcaatatcccgcacccggcggttatgcggaaggtcacaccgttctacccgccgcagtggaagaaaagctcttatatcgcgttctttcagcttccggaaaagccggaacggagattgtctgaagacaattaccgcgtattggatcacgcgatcggcttatccgaacgcccggcgcttttttcacgggaagatgtcgacagctacaaagaagcttggggcagaaaaggagcgctcacggcgatgctgaactggtaccgggcgatcagagccggcggtttaggccctgccgttccgcttaaaatgcccgttccgtaccgattaatatggggcgtcaatgaccgagcgctgagcaaaaagctcgccaaagaaacaaaacggatgattccaaacggcgacttaatcttcatagatgatgcctcacattgggtcattcacgaaaaaccgcgcatcgtcagccatttgattcatgaataccttcagcaataaagtctgtcccgcgtacagactttttcttttttttctcatatctgccgaaaaacatgacaaaatataaaccatatgcagaaaaaattttctttccctgtaacaaaaaaagggtttaaacgtcattaaaaaaaggaaaagccttactgaagttttgcggacaattccttaaggcagtcctaaaaaaagaataatacaaagaaggtgccttcatgaaacaaaggttaatctcaattattattccgtcttacaatgaagggaacaacgtcaagctcatccatgaatctttaaaaaaagagtttcagacgattcattatgactatgaaattttctacatcaatgacggaagcgcggatgacacccttcagcagattaaagaactggccgccagaaaccatcgcgtcaaatacatatctttttcccgcaacttcgggaaagaagcggccattttggcaggatttgaacacgtgcagggcgaagcggtaatcgtgatggacgccgatctgcagcatccgacccatctgctgaaagacttcattcaaggctatgaagaagggtatgaccaagtcatcgcgcagcgcaaccgaaaaggggacagccccgtgcgttccgtgctttcttccctgtattataaatttatcaacaaagccgtcgaagtggacctgcgtgacggggtcggagatttccgcctgctgagccggcaggccgttgatgcccttttgaagctgagtgaagggaaccgtttctcgaaagggctgttctgctggatcgggtttgaccagaaaatcgtattttatgaaaatgtcgaaaggaagaacggcacgtccaaatggtcattcagcaatttgttcaactacggaatggacggtgtcgtctccttcaacaacaagccccttagggtatgctttttcaccggtattctgatattgcttttgtcgatggtgtatattgtaacgacctttgttcatattctgacacacggcgtgtccgtacccggatacttcaccattatttccgccgtgctgtttttagggggcatccagcttttgagtctcggcatcatcggagaatacatcggccggatttactatgaaacaaaaaaacgcccgcactatttaattaaagaagcgaatataacgtacggagaacaaaatgaaacgaattatacaaaaaagcgcaagtggaaccattaaacagccgccgctgtgcgcagggtctggggacgttgtatgaaaaaaaataaatggatcttgccggcagcctgtgtgctggctgcggcagccgctcatatttttttcttaaaagagtggtcggcaggccgctatatgacggggtctggagacgggatcgcccaaatggcggtcttcaaaaagctgctgtttgatcaatatatgaacggcaggctgttttacagctattcgttcggactgggcgggggcgtgtacagtcagctcggctattatttctctacttcttttctattcctgtttatctccgccgctgtccgctttttgcagcttattcagctgacgggtgaggctgatgcgctgttttgggcgcaggcctccgtttttatcagcattgccaagcagagttttatcatattcacggcagcgtgtgtgttccgttatttcgtcaaacggacggtgcctgcttttgcgggcgccgtgttgtacggggtctcgattatttacttccggcatgaggtatattgggactttttcactgacagtatggtgtggctgccgttgcttgtgttgggcgcggaaaaaatcatccgggaaaaaaagccggcgtggtttatcttcgcctgtgcgctgacattgatcaacaacttttattttgcgtatattaatctgattttcatcggcatttatatcttattcaggtgggtgatcccccttgaaggcaatgaggcgaaaaagctcactcaatgcaggatatttattctgtcgggccttctcgggttcggcataagcgcagtttcctttattcctgtcgtatacggataccttcataatctgcggcctccgtattcagagcatattgcatggcttgatttttccgacaacattttattttctagcaggataatcatcctgccggcggcttttttgctttttctatttacatttactttatacaaaaaccgcttgttccggctgtttgcgggaatcagtctgctgtatattctgtttcacttcagtccgttcgcggcaagtgcctttaacggtttttcagctccgcagaacaggtttgaatacgtcctgtgcttcacgattgccggaacggtttcagccgggctttctaagctttcagacatcagcatgaagagtatgctgatgtccgccgtactcgtcgttctgctctattggagccaggtgaggcggtacagtctggatatgtctgatcacgccaacctgcccgtcatccttcttctggtgctgagcatagccgctttctttgcagcaaagacaagactgaaaggcgcggtgcccgccgtctatgccgtcattttgcttacagctgtgcttacggctaatacatatgaaaaatatgctttatcagaaggcgggaagatttatacggtatcgcatacatttatgacgggtgctcactataaaggcaaagaacaatcagagctcattcagcgtctgaaagaaaaagaccctgatccgtttgcccgtttagattggatgaacggtgttttcaataacaccccgatcatatacgggttcaacggattcagcgtatactcaagcatactgaaccgcaatctgctgtccttttactggaacgacctccagattgacatgggcagagaaagcgtcagccgctatgccacattaggaaacagggctaatttatacagcctgctttacggaaaatattatatgacggaaaaaacaaacgaggccggcgtgccgtacgggttcaaaaaaatcatggaatcaacccattatgcggtttatcaaaatcaatatatgcttccgttcgtacggacagccgatcgcgtatataacgagggcggcctgaaaaaagcgcccgcccttgccagggaacgggcaatgcttgacgggatcgtcatggaatcaagcacaaccaacacgaaaaaagcgcctgaggcgaaaaatatgatccgccatgcagaggtagcggccgaacatggcgattatcataacggcatcctgacggtaaacgaagacggcggcggcctggtcattacgccgcaagccgctaagatggacggcggcgattattacgtcagcttttatttgaagaataaagcgaaggaccagggctttacattaaaagtgaacgattacacgacaacgagaaaatcgaatcaatccatttacaaaacaggtgtcaacgatcttactgtcagagtgccgaaaacaaaaaacatccaaatccgtctgccgaaagggtcgtatcagcttgacagactggcgctttatgaagaacggtacgatacgctgaaaagcgcataccgaaaagcggaaaaagaaccgcgggccgatctcagctggcgcggaaatacgcttcatatctcgtatgataacaaaacccgcgcgccgtatatcatgcttccgattccatatgaaaaaggctgggagctgaagataaacggcagaaaagagcagattgaaaaagcggattattcctttatcggatttaaagcgcaaaaaggaaaaaacgatattcaattaacgtatttcccgccgttttttaaacccgcggccgctctatcggtgatcagcctcgtgtttgcggttatatatgtgagaagacaaaaaaagcccggctcttaaacagagccgagctttaattttttctgcaatttttcctcgctgaaaatccagcccgtgtaagaagagagaagctctaaatcatgactgaggtggacgatggcgacaaaaggatagtggcctttgctccggtagcgtaaatcaataaaacgcacctcataatgatctttaaaggtatcgacctcccacctgtaaacgggggaaaatgaaagaaaggctgcaatattttcgtcctgttttgcggccttcatcacatcggtttccggaacgggcacgcggttgaatgtatccaatatcacgacatggccgtcaaggcttctgccgacataaaaggcatgcgccgtcgtcacggcgatacgccactgcctgaatttcatcgtcggcgaaataatgatggtttcaatctcctcttcaatcatttcgcgcagccttcgctttatccgcagctgcatcaaaaaccggacggcgtaatatcctgtgaggatgatataaagcatcagaaatgtcacgcctggatgacctccgatataccacacggcaatcgcggccaaatggctgacgaaaataaacggatcaaaggtattgattaaaccgagagcgatccattttctcgaaaacgggcggatggcctgcgtgccgtacgcgttaaaaatgtcaacaaacacatgcaaaacgacagcgagaagcgtccacagccacaggtgcaaaaagttcgcttccggataaaacataaacaaaatacccggaatcagaacggaccaaaataaaacggcgggaatggagtgcgtgaaccctctatgatttcgaatataaacggcattatttttcagcttcaatatggtatcaatatcaggtgcctgagagccggcaagagcggcgatcataactgcctgagacatgggggtgtgcatgccgacggcaggatcaagagttgcgattccgccaagcgcgatacccatgacaacgtgagtgccagtatccattgttgacctcctagcaggcgttaacaatcagtcgcccgcatatttcgcattataagatattccccattttctgtttgcccaatcatggcgtttatccgccgttctcatatgtttccgctttttctttatcactatttaatgtaacatattatcgtaacgtgccctaagtttacaccaaaatacggtgtcaagaaaagcggaacccgaaacatctgaggagaagatatgaacgcacttgaagaaaaaatgaaacaaaaagatatagacaaatttcgcgaggacttaattacatggttcgaaagagaacagagaattctgccgtggagagaaaatcaggacccgtatcgggtgtgggtgtcagaggtgatgctgcagcagacgcgcgtagaaaccgttatcccttatttccggcggtttgttgagcaatttccgaccgtttcggcgctcgctgaagccgatgaggaaaaagtgctcaaagcctgggaagggctaggttattactcccgtgtaagaaatctgcaaagtgccgtaaaagaagtgcatgagcggtacgggggagtcgtccctgccgaggaaaaggaatttggcggactgaaaggcgtcggcccttatacaaaaggcgccgtgctcagcatcgcatacaacaaaccgattcccgccgtagacggcaatgtgatgcgtgtcatgtcgagaattctttccatatgggacgatatcgcaaaacctaaaaccagaaccattttcgaacaggcggtatccgctttcatttctcatgaaaaaccatctgaattcaatcagggtttaatggagctcggcgcgatcatctgcaccccgaaatcgccgtcctgcctgctttgccccgtacaaaagcactgttcggcatttgcggaagggacagagcgggagctgcccgttaaaagcaaaaagaaaaagcccggaataaaaacaatggcagccgttgtgctgacagacgatcaaggcgatgtctatattcataaacggccgccaaaaggcttgctcgccaacttgtgggagtttccgaataccgaaacccagaaaggaatcaaaaccgaaagagagcagcttgaagcctatttagaaaaagagatgggaacaaccgctgaaatcggggagctggaaggcatcgtagaacatgttttcacccatctcgtatggaatatttcggtctttttcggtaaagtaaaacaagtgtcggatacaacggaattcatacgggtcacaaaagaggagctcgaggaatacgcatttcccgtttcccatcaaaagatatggaaaatggcggaagaaagcggccgcctgtaaaaagcgtcagtcatagctgacgcgagtgccgtggccgtaatccgcttcattccgtttcagtccgccgcgggcttcgatttcctgaatcagttcccggtatttggactggccttcttcgtttaaatacggcataatttgctggaaggcatgatggaaataggcgagctctgaatctctccaatcttttttgggcatcatggccaattcgcccatatcacgtccgacatacatataaaagacccctttcaacacatattgcttttattgtttgttgaatgaaaagaactatacacagcaaggagctgaggaaaaatggaacaaaataaatgcgcactgatcacgggaagcagccgcggcgtcgggaaagcagccgccatcagactcgcggaaaaaggatacaacatcgtcatcaattacgcccgcagtaaaaaagcggcattagaaaccgccgaagaaattgaaaaactcggcgttaaaacgctcgtcattaaagccaatgtcggccagccggcaaaaatcaaagacatgttccgccagattgacgaaacattcggcagactggacgtgttcgtcaataatgcggcttcaggcgtgctgagaccggtcatggaactggaagaaacacactgggactggacgatgaatatcaatgcgaaagcattgcttttctgcgcccaggaagcagcaaagatgatggagaaaaacggaggcggccacatcgtcagcatcagctcgctcggcagcatccgctatcttgaaaactatacgacggtcggtgtctcaaaagccgctttagaatcgttaacccgttatctggcggttgagctgtctccgaaaaatatcatcgtaaacgcggtgtcaggcggagcgattgatacggacgcgctgaagcatttccctaacagagatgaactgctggaagatgcccgccaaaatacgccggccggcagaatggtcgaaattaaagatatgatcgatacggtggagtttttagtttcttcaaaagcggacatgatccgcggccagaccatcattattgacggcggacgttctctgcttgtataagttttaaaaaaagatgaatagccttatcatctcctgcgcattctaaagtgcgtggaggtgataacaatggcaaactcaaaatacagcaaaacagacgttcagcaggtgaaaaaacaaaaccagcaatcagcttccggtcagggtcaatacggcactgaattcggcagtgaaactgatgcgcagcaggttagaaagcaaaaccaatctgctgaacaaaacaaacagcaaaacagctaatcactgaaacgaaaaagcacttcatcttcggatggaagtgcttttttctgttgccaaaacgacaaaacttgtgattcctctacagaatgagtcaaagggttttccgacgtaaaatcgaaatggtaaggagtatcaacctaaaagcctaaggaggaacccgatgtcagagtttgaaaagcttgtaagtgaacagatgaaaatcatggatcagcttctcgagctgcagtcagaacttgaccgctgccggcaggtggaagcggaactcatcagtctggaaagagatgcaaagctggacaatgtacaggacgaaattgcgacaaagcgaaaagacctggccggcatacaggagttattccaaaggcagacagagcaagtcatccagtcttatcgcagcacggaaaagccgtcttcctatgtgcagaaatgaatgtgccattccggaagcggagtggttcttttattttcattttttaattcgtaacgttataatagtgaaaagacttgtcggaaagcaattgcggctgcattgactgcagggctttacagaaagtaggggagaaatatgggatatcccaaggaaggagaaaccattcaaattcacagctataagcataacgggctgcttcatcgaatttggaatgaaacgacgattttaaaaagtacggaattgtgtatcatcggagccaacgaccggacaatggtgacggaatccgacggacggacgtgggtgacgagagaaccggcgatctgctactttcatgcccgtcagtggtttaacgtcatcggaatgctgagagatgacggggtacactattattgcaacatcagctcgccgttcgcttatgacggagaggccatcaaatatattgattacgatttggatgtcaaggtgtttccggatatgacgtataacattcttgacgaggatgaatacgatgaccaccgcaaatcaatgaattaccctaaagagatcgacagcattctgaaggagtatctgaatacgctgctgcactggattcatcagcggaaaggaccgtttgctccggaatttgttgatatgtggtatgaacggtatctgcgctatacaaaataaagaatacaataaaaaacctgttggggtgtcaacaggtttttcacatgggctcacacgccttaaagagagagggggataaagtgtgggcgtaatcagacgctatatgcaatttgtaaaaccttataaaaaacaaatttttatcacagtgttaatcggcatcatcaaattctccatcccgctggctctcccgctgctgttaaaatacgtggtcgatgacattattcaagggagcggaacggcaagcgctaaaacatcatcgctattcacgatcatgggtatcatgttcgtgctgtttttaattctgcgtcccccggtagagtactatcggcaatatttcgcgcaatggacgggcagccgggtgctctatgatatcaggggagtattgtttgatcatattcaaaaattgagcctgaggttttatgccaacacgagaacgggcgaagtcatttcccgggtgataaatgatgtcgaacagacaaaagactttgtcataaccggactgatgaatatctggcttgatatgatgacggtgctgatcgtcatctgcattatgtttacactcgatgtcaagctgacattgatatctgtcattttgtttccgttatacggaatttcagtgaaatacttttacggccgcctccgaaaactgacacgtgagcgttctcaggcactcgcccaagttcagggacatttgcacgaacgagttcaggggatgcccgtcatcagaagttttgccattgaagattatgaacaagccaattttgatgaaaaaaacggacattttctggacagagcgatccgtcatacgaattggaacgcaaaaacgtttgcagtcgtgaataccattacggatttggcgccgctgctcgttatcgcgtttgcgggttattttgtcataaacggtccgctgacggtagggacgatggttgcgttcgtcggctatattgacagaatgtacaatccggtcagaagattgatcaactcatcgacgacgctgacccagtcgatcgcttcaatggaccgcatatttgaatttatcgacgagccgtatgaactgactgataaaccgaatgcagtaaaagctgacggcattaagggcgaagttgaattccgaaatgtctcgttccgttatgaggaaggaaaagaaacgattttgcaggatgtttccttaaaggtgacaaaaggggaaaccgtcgcgctcgtcgggatgagcggcggcggtaaatcgacgcttgtcagcctcataccgcgtttttatgatgtatccggcggcagcctgctgattgacggcacagatattcgcgattatgaagcgagaagcctccgcaatcaagtcggaatggtgcttcaggatacgtttctgttcagtgagacgattcgtgaaaatatcgccatcggtaaaccgggagcgtctctggatgaggtggttgcggctgcgaaagcggcaaatgcccatgaatttattatgaatttcccagaaggttatgaaaccaaagtcggcgaacggggcgtcaaattgtcaggcgggcagaaacagcggatttccatcgcgcgtgtattcttaaaaaatccgccgctgttaatcttggatgaagcgacatcggctcttgatcttgaaagtgaacactacattcaggaagcgatggaaaagcttgcgaaaaaccggacgacttttatcgtcgcccacaggctgtccacgattacgcacgcggataaaattgtcgtcatggaaaacggcgccgtcgtcgaaaccggcacgcacgaggaattaatggcccaaggcggccagtacagacacttatttacgattcagaatttgaactgatacaaaaacttatgccgtccgaatgggcggcataagtttttttgaatgcaaaaaaacccggttttacggaagcaccgggttactcttcgtctgtttctaattcgctgtctttcgggtggtatgtctgaaaactcgtaattaatgtatcgagatgctccagctgctcgcggtattccgcaaccgcagccataatgctgagcatattgtaatcaagcagttcatcctcgcagttctgctgatttttcaagaaagacttcgtcaaaagctgtttatatcttatgctttcttcagcatcgtcatcatgcggtttgatcttgccgaccgtccgcatcagaatcctttcatgccaatgaagcagataatcaatttcttctgtcagcgtctcctgaaattcctccggcatatgataaatctcgttttcatagcggtgcagctttttcagcgtatcaagcgcccgattcgccgtaataatcgcctgtctgaacaatacaagcttgcgcgactttacatacgtcgttttcttaaagtagcttctctcctctttataaagaaggtacgtatgatcaagcttcatcatcttttccttcagcttctcaatatcctctttcaatatcgagtgttccgtggactgacgcatcgtcagcctgatccatttcatgatctcatcggtatattcaaccgtatgatgagtcagcttcgtttcgtatttcggcggaagaaacacaaggttcacaataaaagaagacagcacgcctaaaataacggtgcttgttcgtatcagagcgaacgtcaggaagctgtttcccggtgtttctaaaattgcgataaccgtcacgagcgcaatcgaaatggtgtgttcaattttcagttttaacatgatcgtgatgacaatcactgcggtcaatccgatcataatcggactcggtccgaaaatcagtccgaatgccgtagcgatgacagcgccgatgatatttgcctgaacctgatcaataatgataagaaaagacctgtaaatagagggctgtatggcaaatatagctgcaatcccggcaaagatcggcgacggaagtccgatccatgatgctaagtagagtgcgagcgtaatcgcaatccctgttttaaaaatgcgggcaccaagtttcattggtttgtgcgtgcattcctttctctaataaattatgtgccgaacgaacggctgacacttacatttccctgtcggctgatttgctaaacaataaagtaatatacagggatcataccaattattcaaggtctttttttgaaaaaaccattatctcacaaatcggacaaaaagaaaaagcggaagccccgggctcccgcttgtttcagcagttattttttcatatgtctgaacgcatcttcaacggcctgtaaagtggcgtcgatatcctcttcagtatgtgcggttgtgataaaccaagcttcatacttcgatggagcgagattgatgccgcgctcaagcatcagcttgaagaacttggcgaatgcttctccgtccgtattttccgcctgctcgtaattgacgatcttttcatcagtgaagtaaaccgtgagcgcgccttttaaacggttgacggtgatggtaatgccgtgtgtctccgcatgggcgagaatgccttgctcaagtctggcgccgagctcatcaagccgctcataaacgccttcttccttcagcacttccaggcaggcgatgcctgataggatagatgccgggtttccggccattgtgccggcttgatatgccgggccgagcggagcaacctgctccatgatctcttttttgcctccgtaagcgccgatcggcaggccgcccccgataattttaccgagcgccgttaaatcaggcttcacttgaagaagatcctgcgcgcctccgtacataaaacggaacgccgtgatcacttcatcataaatgacgagcgcgcccgctttatgggtcaattcatttacctgttctaaaaatccttcttcaggttcaacgatgccgaagttgccgacgatcggctcgacgagaaccgctgcaatttctgaaccccatttatccagcgcggctttgtagctttcaatgtcattgaaaggaacggtaatcacctcattggcgatgcttttcggcacgccggcggaatcaggagtgccgagcgtagacggaccggaacccgcagcgacaagtacgagatcagaatggccgtgatagcagccggcgaatttaatgatttttgtccggcctgtataagcgcgtgcaacccggatcgttgtcattaccgcttcagtgcctgagtttacgaatcgtactttatcaagtgaaggaatggcctccttcagcattttggcgaaagtgacctcatgtttggtcggcgtcccgtacagcacgccgttttcagccgctgttttaatcgcttcagtaatatgcggatgggcatgtccggtaataatcgggccgtaagccgctaaataatcgatatactgattcccgtctacatcccagaaataagcgccgttcgctttttccatcgcaacgggtgaaccgccgcctaccgctttataggatctggacgggctgttcacgcctccgacgatatgctctaacgcttccttatgaagttcaactgattttgtatacaaaaaatgaccctcctaatatctccttacatcatgttctattgtagcatgcttcattgcgagcacaacggttcatgcttccagaaaagagcggggggataacggttgtaatcttaacgtgaattggatacgcttaataaaaaacccggaggtataagaaatgacgattgaaatcggacaaacagcaccggctatgaaattagtgaatgacagcggtgaagaagtagcattgacggattttaaagggaagtacgtcgttctctatttttatccgaaagacatgacacccggatgcacgacggaagcatgtgatttccgtgatcagcacgaaagtttcgcgggacttgatgccgttatcatcggagtaagccctgacagccgtgacaaacatgaaaaatttaagcaaaaacacgatcttcctttccagctcctcgttgatgatgagcacaaattggcggaagcttttgatgtgtggaagctgaagaagaattttgggaaagaatatatgggtatcgagcgatccacttttttgttagacaaagaaggccgtcttgtgaaggagtggagaaaggtaaaagtgaaagatcacgttgccgaggcgcttcgcgaattggaacaaattgcgtctaattaatggacaaatgctgaactcacggggttttcttcagattacatttgacaggagaccggaaaaagatgtacactaattataaacattataaagtaagaatcttttttagaagagaggtgcatgacggatggctgcacatgaattaaaagaagccttagacacgttgaaggatacgggagtccggattactcctcaacgtcatgccattctggaatatctcgtggattctatggcacatccgacagcggacgatatatataaagccttggaagggaaattccctaatatgagtgttgcgacagtgtataacaatttgcgtgtattccgggaagcggggcttgtaaaggaactgacgtacggagatgcgtccagcagatttgactttgtcacctctgaccattatcacgccatttgtgaaagctgcggaaaaatcgtagacttccattatcccgggcttgacgaagtagaacagcttgcggctcacgtcacggggtttaaggtaagccaccaccgtttggagatttacggcgtctgccaagaatgttccaaaaaagaaaaccactaaacgaagctgaccgctttgatacggtcagcttcgtttattttacactgttttttctgttataagactcatcgaacgctttgccttccaatcctttatccaatgtaagcggctctctgcaatgcatgcacatatccactctgcccagaatcttcgtttctttctcgcaagcggggcacatcacccggaccgcttttgtggacagcatgccgatccaaaaataaacggcggtgctgagcccgatcgacagcaggccgagaatcataaacaagctggcaagcaaaacagactgcttaaagaacagcccgatgtacataatgataaacccaacgaaaaccaaacttaacgcaaacgttctgatcttattaattttgcttgagtatttcgccatgtccatccccctctcgtttaactatagcacaaaacagatggcatattcttcatgttttcgtaagaaaagggaagaataaatatggcacctgaaaggaaatttgttataatagtgcaatgtgtttagaaaaaaggactttcatgttttatcatagaaatgtagaaacaatagctagtgaaacaatcgcattggaggaatcgtaatggacaatcttctccgtccaatttaccaagaaagagcaagtcatcccgatacgctggccgtccttatgattgagagaaggagtaaagcatcatccatcacggataactttgatgcggtcatgcttgtcattgtcaaacaggctgatgaacctctttttataaagcattatgaattcgaacaaaaaaccgcttctttacatattgtaacggatgctctgcttcaggaatggattctgcttgggaccaatagaagagtcatagattggatcatcaacggcaaagtgctgtttgaccgcaatgaatatatatctgaactcaatgaccggctcagcacttttcctttcgccgagcggaaattaaagatcggaatggaatacggcaagctgatcagaagatttgtagaaggaaaagcgttttttgaagctgatcattttctggatgcatattatgcggtagtgcatgctcttcaccacttggcccgcatagaagtgattgaccgggggttttatcccgaaacgacagtctggaaccaggtccgtcacattgagccgcaggtatataagctatattccgaacttgtcgagagtcacgaaagtttggagaaaagactcgaattattattcttagcaaatgattttctcatccattcaaaagctgaaatcggttctgcgcacctttttcaagtgatgaaagaaaaagaaatgtggcagtttggagaattgcttcagcaccctgaactggtgcacttcacccaagatcttggtgtcatgcttgattacctgacggaaaaaggctttgttgaagtatctcaaatagagaccaaagggcaggaagtatatcatcgaggatattctttcaaaaaaagtgttgacgctgaatcataggcatggtatattattaaacgtcgctgatgcgcttcaacaaaaagctcacagcggcggagaaataaaaataaaaaaacatttgacagcaactcgctgaaatgttatactaaaaaagtcgcctcgagatgaggttgaaatgatctttgaaaactaaacaagacaaaacgtacctgttaattcaaagttttaaataaatcgcacagcgatgtgcgtagtcagtcaaactactttatcggagagtttgatcctggctcaggacgaacgctggcggcgtgcctaatacatgcaagtcgagcggacagatgggagcttgctccctgatgttagcggcggacgggtgagtaacacgtgggtaacctgcctgtaagactgggataactccgggaaaccggggctaataccggatggttgtctgaaccgcatggttcagacataaaaggtggcttcggctaccacttacagatggacccgcggcgcattagctagttggtgaggtaacggctcaccaaggcgacgatgcgtagccgacctgagagggtgatcggccacactgggactgagacacggcccagactcctacgggaggcagcagtagggaatcttccgcaatggacgaaagtctgacggagcaacgccgcgtgagtgatgaaggttttcggatcgtaaagctctgttgttagggaagaacaagtgccgttcaaatagggcggcaccttgacggtacctaaccagaaagccacggctaactacgtgccagcagccgcggtaatacgtaggtggcaagcgttgtccggaattattgggcgtaaagggctcgcaggcggtttcttaagtctgatgtgaaagcccccggctcaaccggggagggtcattggaaataacaggcttatctcccccaagagtccacatcgacggggaggtttggcacctcgatgtcggctcatcgcatcctggggctgtagtcggtcccaagggttgggctgttcgcccattaaagcggtacgcgagctgggttcagaacgtcgtgagacagttcggtccctatccgtcgcgggcgcaggaaatttgagaggagctgtccttagtacgagaggaccgggatggacgcaccgctggtgtaccagttgttctgccaagggcatcgctgggtagctatgtgcggacgggataagtgctgaaagcatctaagcatgaagcccccctcaagatgagatttcccattccgcaaggaagtaagatccctgaaagatgatcaggttgataggtctgaggtggaagtgtggcgacacatggagctgacagatactaatcgatcgaggacttaaccaatttgaatgtatgcttactgttatctagttttgagagaacactctcaatggtttggtggcgatagcgaagaggtcacacccgttcccatgccgaacacggaagttaagctcttcagcgccgatggtagtcgggggtttccccctgtgagagtaggacgccgccaagcttttctaaaattttatcatcgcggggtggagcagttcggtagctcgtcgggctcataacccgaaggtcgcaggttcaaatcctgcccccgcaaccaaaaaaataaatggtccggtagttcagttggttagaatgcctgcctgtcacgcaggaggtcgcgggttcgagtcccgtccggaccgccatttttattgtaaacgaaacgatcatgttttcgttttttttgtgttttcttttaaatgctggcagcttggtatctaaccaagctttcttttatatcgttaaagtcttggatattgaaacataatccgatacactagaaagagctgtatttcacaagagcgtcagaaagggagacgggagatatatggatgagtttgatttgattcacagtattacgccgcattcgcattatcatccttccgtcgatgtagggatcggtgatgatggtgcggtttatacagcatcaccccatatgcagcaaattgtctgccttgatacaatggtggagaatgtccattttaaattagagtattcctctcctcatgatatcggttataaggcgcttgctgttaacattagtgacgtggcggcgatgggaggcattccgaagttttatttggtgtctctggcggttccttcttgctggcagaaagcggacgtccaggcaatgtatgaaggaatggcggaactggcgaaactatatcaaatggatttgatcgggggagataccgtctccgcttccggtcaagctgttattaccgttactgtcatcggagaaattgagaaggatcgcgcttgtctgcgaagctcggcaagacccggggatgttgtgtttgttacgggggatatcggttcgtctgcagcaggactgtctcttttgttgggagaaacacttccttctgcttttcacacgagtgattattttatccgaaaacataaacggcccgttccgagagttcaggtcggccgcttctgctctcagcttcagcgcacggctctgaatgatatcagtgacggattggccagtgagctgcatgaaatagctgcggcaagttcagttacgatagaaattgaagaacaacttctgccggtgcatccggatttgcctgagggagattctgagtggaagaaatgggtgttatttggcggtgaagattttgaattggttggaacggtttctcagcaagagtggacctctctgcttgattactgcactcaatcgggcattccgattgcgaagataggagcggtaactgaacggaaggaagcatgggttcttttgacagccaatgatcagagacaaatcgtccttgagaaaaaaggatacaatcattttaaataagacgggtgactcactttgaagacattacaatggagaacgaaaaaccccgaagaaacgaaagccgtagccaagcttgccgcttctttggcaaagccgggagacattttgacactggaaggcgacttaggcgcgggaaaaacgacttttacaaagggttttgccgaaggactgggaatcacgagggtggtaaacagcccgacttttacaattataaaagaataccatgacggttcgcttcctctatatcatatggatgtgtatcgtatggaggatgaaagcgaagacttagggcttgaagaatattttgagggacaaggcgtctgcttaattgaatgggctcatttaattcaggatcagctgcctgctgaacggctgcagatcgttatcacaagagccggtgatgaggcaagggacattacctttacggcttgcggaacacggtatgaaacgctttgtgaggagataaataaacatgacaatactggcaattgatacgtcaaattacacgttgggtgccgcgctcgttcgtgacaaaacggtgatggcggagtatattacatatttaaaaaagaatcattccgtgcgggccatgcctgctgtcaattcattgctgaaggattgcggcctaacaccgcaggaccttacgaaaatagcggtggcgaaaggaccgggttcgtacacaggtgtcagaatcggtgtgacgctggcaaaaacattggcatggtcgctgaagcttccggtttccgctgtctcgagtctggaggtgctggcggctaacggacggcactttcaaggactgatctgcccgttatttgatgcccggcgcggacaggtatatacgggactttatgaatatcaggacggccgattacaatccgttcttcctgatcagaatgtccttttgactgattggctcggcatgctgaaagaaaaagcgtctccggttttatttttagggcacgatacagccattcatgaagaaaccattctgcatgagctgacatctcaagcagtgattggaacggctgcacagcataatccgcggccgtcagagctggcgtttttaggcttggaaaaagaggaagcggatgtccacagccttgttccggattatttgcgtctggcagaggctgaagcgaaatggatggaatctcaaaaatagggtgatagggatgaaaacgaaaacggcgattcgaagcatgcgtccggaagatattgatcaaatttatgaaattgaaacagcatcctttacttctccgtggacgaaggattcattttatcatgagcttttggaaaatccgtatgctcactatcttgtcattgaaaaggacggctgtctggcggggtattgcggaatctggattattatagatgacgcgcagatcacgaacatagccattaagccggaatatcggggccaatcattgggagaagcgctgtttcgctctgcgatagaattgtgcagagaaaaaaaggcaagaaggctctctctcgaagtcagggtctcaaatcatcccgcccaatccttatataaaaaattcggtcttcaggccggaggaatcagaaaacaatactatacagataacggagaagatgcgttattaatgtgggtgacattacatgagtgaaaaacaagatatttatgtactaggaatcgaaacaagctgtgatgaaacagcagcctcagtcgtaaaaaacgggaatgaaattatttcaaacgttgtcgcttctcaaattgaaagccataaacgtttcggcggggtcgtgcctgaaatagcgtccagacatcatgtggagcagattacccttgtgattgaggaagctctttcaaaagcggagatgggctttgatgaccttgatgcgattgccgtaacggaaggacccggacttgtcggagccctgttaatcggagtcaatgcggcaaaggcgttaagctttgcccatcaaataccgttagtcggcgtccatcacatcgcgggccatatttatgcaaacaggctgataggagagcttcaattcccggcgcttgctttggttgtgtcaggcggacatacggaattggtttatatgaaagagcacggttcattcgaggttatcggtgaaacgctggatgatgccgcaggcgaagcttacgacaaagtggcaagaacgatggggcttccttatccgggagggccgcagattgataagctggctgctgtgggaacggattccattccgcttccgcgtgcgtggctggaagaagggtcttacaatttcagcttcagcggcctgaagtcagccgtgattaacacgcttcataacgcctcgcaaaaaaatgaggtgattcctccggaggatcttgccgcaagctttcagcagagtgtcattgatgtactgacggcaaaaacctctaaggccgcgaaagaatacggggttaaacaagtgctgctggcagggggcgtagccgctaacaaagggctgagagccgcactgcagcaggaattcagccattcgggagatcccgagcttgtcatcccgccgctttccttatgtacggacaatgcagcgatgattgcggctgccggaaccgttgcttttgaaaaggggattcggggctcatatgatatgaacggacagcccggtttggaattaacatcctttgatcgtctcacgttgtaaaacgtgaggctttttttacttattaacagataattctaacatatccacagcattgtgaatatattcagaaatccaggctggataaggggctgtaagttgttagtaaagtggataaagtcagaaaattttgtggatagtgtgtataacacgcttacttacatggctgacaaggaggatagctgtggataaaaaagcaccccttaaagaggtgcttgactttttctattcttctgaggagagttcctcccattctgctaataagttttcgagctcatgattcagagcttcattctccgcgtgaatggtctgtaccttttcatgatcctgatacacgtcaggatcgcacagcagctcctcattggcgctgattttctcttcggcggatgagacggctgcttcaatttcttcaatgcgtctcaggcgctgccgttctttcttcttccattctttttcttcctcgtaagttcttttcgtatcctgtttgaccttgccggcaggctgagcctgctccttttcctgccgcttcatttcttccagttccagctgctgggcttttttctcggtgtaatagtcatagtcacccaaatattcttctgcatgatccggagacagctccagcacccttgtggcgatcctgttaataaagtagcggtcatgcgatacaaataacagggttcccggatagtcgatcagggcgttttccagcacttctttactgtccagatcaaggtggtttgtcggttcatctaggatgagaaagtttgctttttgcagcatcagcttggcaagcgcgactcttgctttctcaccgccgcttagagaacggacaggtttcaggacatcgtctccgctgaacaggaagttgccgaggcatgtcctgatctctttttccggcatgtccggatattcatcccacagctcgtccagcacgcgtttggacgaggtcagttcagcctgctcctgatcataatagccgattgtgacattggaaccgtacgtgatcgatccggattcggggctgagcgtgttcataatggttttcagcaaggttgatttgccgattccgttcggtccgacgagggcggcgctttcgcctcttgtgatgccgaaggtcaggtttttcaagagcggcggctggccgtcatagctgatggaaacatcctgtacgcgcaggacgtcgtttccgctctgttttgtaatgtcaaaacggaaggcggctgatttttcatccccgagcggctttgccatgacgtccatccgttcaagctgttttcgtctgctttgggctcttttcgttgtagaagctctggccagattgcggtcgacaaaatcttgaagcttggcgatttcgtcctgctgtttttcatacagcttcaggtctttctcgtactgctcggctttttgttctaaataggcgctgtagttgccgaggtattttttgctttctgtccgtgagacctcgtacacttggctgacgactttatcaagaaagtatctgtcgtgggaaacgatcaggatggcgcctgaatatccctgtaaataatgctcaagccatgtaagcgtatcgatgtcgagatggttcgtcggttcatccagaataagcagatcaggctgggtcagcagcagctttccgagcgcaagccttgttttttgaccgccgctcaggctttgcactttcacggaatcgtcaaattttccgaagccgaggccgtgaaggatagatcggacatccgcttcatattgatagccgcctttatccttgaaatcctgctgaagcctgtcataggttttcatcagcgtctcaagctccgcgggggcggccgtggccatcttttcttcaatagagcgcatttctttttccattgctttcaggaaatcaaaaacgctcagcagttcttcttttatggtaagctgggattccaagcctgtgtgctgggcaagatatcccatcgttaattctttcggtttgattaattcacccttttcatatgaaaggtgacctgcgataattttaaggagagttgatttgccggctccgtttctgcctactatggcgatgcgatcccgagatctgacttcaagctttatattgtttaaaataggatcagcgccaaaagatttggatagctgattaatttgtaagatcatcatattatttcacctctgttataataagttaagtgtagcttatcaacctgctgtcagcaaacaatacatcagaattggaacattataggataagacatcagggagaaaatagtgtatgatcagaagtaaggagagtttaaatatgaatggattttctcattttaatgaagaaggccgtgcccgcatggtggatataagcgataaatcttcaacagtccgtactgccgctgcgatatccagcgtacacatgaagcatgacgtgtacagcagaatcaaaaaccgcgagatcggaaaaggagacgtgctggctgtcgcacaggtggcaggaattatggccgcaaagcagacgtcagcgattatcccgatgtgccacccgctttctttaagcagcgtcgacatttcattcggctgggaggaaaaggattccgaagccgttcttcatatacaggcaagcgtaaaaacgaaagggagtacaggtgtggaaatggaagcgctaacttccgcttcagtctgcgctttgaccgtttatgatatgtgcaaggcgctggataaaggaatggtcatcggcccgacctgcctcatggaaaagacaggaggcaaaaacggtgattttaaaagagatgcatctgagtataaagtggaggaccaatcatgaacaaggatcaatcaaaaattccacaggcgacggcaaaacggctgccgctttattatcgctttttaaagaatttacacgcgtcaggaaaacagcgcgtttcatcagctgaactgagcgacgcggtaaaagtcgattcggccacgatccgccgggatttttcctatttcggggcgctcggcaaaaaaggatacggctataatgtggattacctgctgtcatttttcagaaaaacactggatcaggatgaaacgacgaacgtcattttgatcggtgtcgggaatttagggacggcgtttcttcactataatttcacaaaaaataataacacaaaaatatctatggcttttgatgtgaatcagagtaaaataggaactgaggtaggcggtgtgcctgtctttgatcttaatgatttagagcttcacattaaggatgaacccgtggcgattcttaccgttcctgcggttgccgcccagtcaatcaccgaccggctcgtgtcgctcggaatcaaggggatccttaactttacgccggcccgtttgaatgtgccggatcacattcgaattcatcatatagatttagctgtagagcttcaatcattggtttatttcttgaagcattattctgttttggaagaaattgaatagcgaaaggaggagctgcacatgatcggtcctggaagcctggcggttatcggtgtggtagcggtgattattttcggtccgaagaagcttcccgaattaggaaaagcggcgggggacacgcttcgtgaatttaagaacgctactaagggattagccggtgaagaagaggaaaaaaagaaagaagaacagtaagataggatgacgcgtatgagagtgaatcaaatgacgcttgtggagcatattgccgaacttcggaaacgattgctgattgtggcgttatcctttacggttttctttattgccggcttttttctggcaaaacctatcattgtgtatcttcaaaaagccgatgaagtaaaagagctcacccttaatgcttttaacctgacggatccgctgtttatctttttgcagttcgcgtttatcatcggcatcattttgacttcgccgattattctctatcagatttgggcgtttgtcagcccgggtctgtatgagaaggagcgcaaagtaacactcagctatattccgatttcgatcgtgctgtttgtcggtggtgtgtcgttttcttattatattttatttccgctggtcgttgattttatgaagcgggtctcgaatgacctcgatgtcaaccaggtgatcgggatcaccgagtactttcattttctgctgcagctgacgattccgttcggactgctgtttcagatgccggtgctgatcatgtttttaacgagactcggtgtgatcacgccgatgtttttatcgaagatcaggaagtacgcgtattttgtgctgcttgtgatcgccgcgatgattgcgccgcctgagctgctgtctcacttgatgattaccattccgctttgcattttatacgaggtcagtatcctgatttcaaaagcggcgtatcggaaaaggcagaccagcagtgaatccgatcaggacgtatcagcataaaaaaagccatttctcaatgatgagaaatggcttttcttttatttttgattttttttcactttaaatgagaaagcgaacattttaaacgagatgctgatattataagcggcgaaaaccatcagcagtatggaataaaaagaccacatgcttcccggagagcttgcggccaaatacgtaaagatacagccgactgcgaaataaatcaagccccaagtcattgggttcctcatacaaacaatcctccaataattaattgcatttgctcactatgctgttcaatatatttttgggcggggccgagctgcatgaccacgacaatggtattcatcatgacatgggcgaatatcggcacaataatccgtttcgtctgcacatacaagaacgcaaaggtaaagcccatggccgtatacagcagcaggtgcgtgaggtcttgatgcacaatgccgaaaatgacggaactgatcagtccggcgataatgaaattcgttttttcatataatacaccgaaaatgatcttccggaaaatgatttcttcaagaatcggcccgacgatagaagaaacgataatcatgagcggcatggctttaataatgctgagaatggctttcgtgttttcggaaccgctgcccacatgaaagacatactgctcaatcatcccggcgattccctgagaaaataaagcgagccatattcccgcgaccgcccagagaacggacatgccggcggatgctttcttcccgtttcttaatgtctgcttcggcgcggttctcaaaatcaagagaacgataatcaggcagataaaaaagcttacgacggaataaatcccctgagccatggtgagattcgcattcgtagggtgcccgcccgcatagccgaatttgtacattaaaggaatgccgatcaatgcggaaagctgcatgataacatatgtcaaaatgatataccaatactgttttctcaaatgatatgtactcctttatcctataaaatcaacttatttgttcttattgtaacacaagtgaacttgacgtgaaaaaaggagaaaatcagtgcgagagagaatcatgtaagcgtgaaaattttttattcttatgacttgaaattggaagtgagattctttattataataactgtgttagcactctttagagctgagtgctaaaattacatattcatactattgaggaggttattacattgttaaagccattaggtgatcgcgttgtcattgaactcgtagaatctgaagaaaaaactgccagcggaatcgtattaccggattctgcaaaagaaaagccgcaagaaggcaaaatcgtggcagccggttcaggtcgcgtgttggaaagcggagagcgcgttgctttagaagtaaaagagggcgaccgcattatcttctcaaaatacgccggtactgaagtgaaatacgaaggtactgaatacttaatcttacgtgaaagcgacattttagctgtaatcggctaagcaaataaatatttttaaaaattcgaggaggtttcgttaacatggcaaaagatattaagtttagtgaagaagcacgccgcgctatgcttcgcggtgtcgatgcgcttgctgacgctgtaaaagtaactttagggccaaaaggacgcaacgtggttctggagaaaaaattcggttctccgttaattacaaatgacggtgtgacaatcgcaaaagaaattgaacttgaagacgcgtttgaaaacatgggtgcgaagcttgtagctgaagtagccagcaaaacaaacgacgttgccggtgacggtacaacgactgcaacagttcttgcgcaggctatgatccgtgaaggcctgaaaaacgtaactgcgggagctaaccctgtcggcgtgcgtaaaggtatggaacaagccgtaaccgttgcaatcgaaaacttaaaagaaatttctaagccgatcgaaggcaaagagtctatcgctcaggttgctgcgatctctgctgctgatgaggaagtcggaagccttatcgctgaagcaatggagcgcgtaggaaacgatggcgtcatcacaatcgaagagtctaaaggcttcacaactgagcttgaagttgtggaaggtatgcaattcgaccgcggatatgcatctccttacatggtgactgactctgataagatggaagcggttcttgataatccttacatcttaatcacagacaaaaaaatcacaaacattcaagaaatccttcctgtgcttgagcaagttgtacagcaaggcaaaccattgcttctgatcgctgaagatgttgaaggtgaagctcttgctacactcgttgtcaacaaacttcgcggcacattcaacgctgttgccgttaaagctcctggcttcggtgaccgccgtaaagcaatgcttgaagacatttccgttcttacaggcggagaagtgatcacagaagatttaggtcttgacctgaaatctactgaaatcggacaattgggacgcgcttctaaagttgtggtaacgaaagaaaacacaacaatcgtagaaggcgccggcgatactgaaaaaatcgctgcacgcgttaaccaaatccgcgctcaagtggaagaaacaacttctgaattcgacagagaaaaattacaagagcgtcttgcgaaacttgccggcggcgtagctgtcatcaaagtcggcgctgcgactgaaactgagctgaaagagcgtaaacttcgcatcgaagacgccctcaactcaactcgcgcagctgttgaagaaggtatcgtttccggcggtggtacagcgcttgtcaacgtatacaacaaagtcgctgcagttgaagcagaaggcgatgcgcaaacaggtatcaacatcgtgcttcgcgcgcttgaagagccgatccgtcaaatcgcgcacaatgctggtcttgaaggatctgtcatcgttgagcgcctcaaaaacgaaaaaatcggcgtaggcttcaacgctgcaactggcgaatgggtaaacatgatcgaaaaaggtatcgttgacccgacaaaagtgacgcgttctgctctgcaaaacgcagcttctgtagcagcaatgctcttaacaactgaagcggttgtcgctgacaaaccggaagaaaacgccggcggcgcaggaatgcctgacatgggcggcatgggcggtatgggcggaatgatgtaaaaaattatgatccctgtttggacataaggggttgccagatgtaatgccatacgaggtctctcacaagttcaatgaatttgtgaggggctttttttatttctatcattcatctcaaattacgaatgaatgatgctaatttatttaagttagcatcggctatagtacaagatactctcaattttccaaaaacagatttaataattcatttgaagcagttactaaggatgcagagtgctatttaaacaccaacaatcctgtctatctgaaatttaaacatcattttactgttaataattatacccaagaggatggtcaaacaattgcacaagcatttgcagattgccttaaagaaaaataaaatctgaataattaattcttcccaaaagtaatgcacattatgagggggcgcatatcattgtgatacagttaaagattatatataaggcagtattagtaattttaataagtgcctgtttattattgtttaatggatggtattttcataaatgtattattgatccgcattactaccaattaacagatttttcggaagaagatattcaaatttttgagcatttttataatattgatctaccttcaaacacgaagtttattaaagcagagcaatttgaaacaggggtaggtaattattctgcgattttgtacgtagcattacctgccaaaaaggtaaagcctttagtttctgactattcttatatgcctatcttttataacaataggtatacagtattttatggtgttaatattacaagcagcaataaggaaacagcacaaattacatttggagcagacgatagttcgctgaatggttctttatggagtaagcaagtaaggaatctcttagaatcgaaagggaagtatattggcgtttcagatgaaacttatgttatttctgcgtttttaattaacgtcgtttttattgcattacttgtttggatcttgaaaaagagcagaagaactagagtttgaattaagaaatatttgaactcaccagcataatgtagattaggaatacttaagggtatatcggacagaaagagttttcattgcacagatctttattaaataataacactaaaccaattttaaatgcagttcaagggtattagaatagtcttgtttaatagtatggaaggaaagagaaaggggaaacatgaggaacttatcatgctgttattcacattgtgttttctaccccatatccattgggcgcttggaaggacaccttggcaaaggttttatagatgatactatacttcaaattttaagcttcatttcacaaaaatcttaaatttgcattaatattataaatttctatcatacttattcatttctcggaagaaagatatggaaaaacctctgttttttttaggaaaatatgttattataattttggatttaaaatattaaaaagaaaagaggaattctaaagatgaaaaagttagtaatgaccctgtttacagcagtacttttgggagttgctattttcgcaggtgggtcagaagccttagctatggattcgaaaggtacaatcaaatttaaaacagatgctaatacatatacgaaaagtgctacttccattgtagttacgggtactttggctagggatttagataatggcttttcagtaattatcttaaataataaaggtaaagtatttgccagaaaagatatttcgcatagtattggttcacgtaattttcgtgtgagtttttcaacgaaaaatcttcctgcaggtaagtatgatgtgcaagttggacaggattggggaggaagatattggtcaggtgaactaaaacattatattacagtacagcattaatacggctgtataagtattaacctcttgttgttaaaaagtttaactttagaaatttgttttctgtgaaaaattaatttttcaatcaaggtatcttaatcaatttactgtactgataaagatacctttttatctttaaaaacaacaaggtcatgagtgtttttcaaagctcttaccgctagccgcaatgtatttgtcttttaaatgagaatatccatttgctccacctcaccccgaatcccaatcccaggctcccacgaatcaatcagacgaatcgccttttgattagcttctatcgctttcgtagtttctccttttcgatacaacagctgtgccattccgtaatgatagtaaatcagttcaacttgattggcgttgtgtttgtcatagagcatttgttcaaaggctttttccgctttttcgagttgatcacactttacgtaagccatgccgaggttgaaataggcttctatcgttttttcgccgccgtatgcggcgctggttgtgtttgctgcttcgtataatgtgatggcttcttcgtagtgagagcgggcgaaactcaggtcgccgcggaccagaagaaccctgtgccggataatgggcgagacgggctgatctttgatgccgtccagcattgctgccgctttgtccggttctccgatttttaacagcagcctcgattgcagggcggttccccatactttcaagtcgtcgtgatccggcgcgcctgattgttcgagtatcttcaggccggcttctatttgcccgagagctccgtctgaatcgttgacttccatcagcgcccagcctgccgtgtcgatccgaaagtaagcttcccgcgtgtgttcgcctgattgacgggcggcatcggcagcttttaatccgtattcgattcgcaggggcaggttgattctgcttagaaaatggctgatgcggatgatgagtttaatcaggatgtcatgttgtccggtttcgcccgaccattcgatgacctttaggatgttcggccattcctttttcatttgctctaaattccgtcccagcaagtagctccaatagacagaattgggctgttcccgctttatatgggtttccgcataatcaatataataatgcgcccagcggctgcgggcttcttttgcaaattcgtgattttcggataagtgctgttctccgtaagcgacaacggtttgatgggctgcgtattgaattctaccttcgtttcgttccggctgtattaaagcatatgaccgcatttgctcaatcgcgtaatgaaaccgccggacgtctaatccggccgcttgagccaagcttttctcatcagggggcttagcgaaaaagcaaagcgtctgccatagttttcgtgtgtcttcatgacatctgtcccatgtgcggccaaagagaacctcaaacaattccaataatgagtagcctgcttgtttaagttcttgaatgagctggggagcggggatatcgtcgtctgacatgtaagcgatgctcagtgccatggccttcgggttgccggcggctgccgagacgaattcattcttaaggtcaggtgatagctccaacagctgctccagcttttcccgtttttgcgggaggttgcatgtttgcagacagcggtgcacttcttgatggaaaaattcaagggcatctgtttgttcaaggccgcccagctggatggccgccagttccccgaggccgtcccggtatgtctgttttacgttttcccgtgccgtaaggaggacttttacgccttgcggaaggccgatgataaattcgtgaatgttacgttccgctgtatcaatgccgtcaacgatcagcaataccggtgtttcatttgaatgagcggctaatgcattgcggacgacaaaccgtttttcgttgatggatttgtcgatttgttctgcgcgtccgagctgataggcgatcgtgtttaaaaaatcgctgaagctcaatcctttccagtccgcgctgatccagatgatgctgttgaatgccggccaatctggtgaaccgccggcacaaaggtaggctgcttcaagagcgatcgttgttttccccatgccggcccagcctgtgattaaacagaccggtgactgggacagcatccattgccggattgcttccatatcaaagttgcgtccgataaagtttccggtccggcgtgacggtaagttatgcgtgacggagtttcttgtaagcgcattcgtttcgtggcttagtctgtcatgaaacagccgctttactgctttttcaacatcgtcatcactcggtgctccgaatgatccgtctttccggagtatttttgctttttttagacaagacgccgtccaaacgggcaatgcgggcttgataacgggaatcgtggtgttttccagaaggccggtcagccattcaggatccatgtcagtcttttctataatgatccagatcatgccgaacagctttccgtcgtcaattcgtccgggaatgtagtttgcgcccatctgtccgatccagcttttgatcgtgttagaggaaacgcctaatcggagtgcgatttgatctatataagactgccctgttttttcgttctttttccttctgactttataatcaggatgaagtttcagcgatttgacggcaggtgccagcagttctgcaaattgtgtccggttttcaagttcagccattagcctgcacctcctattagtactattttatcaattcagtgttttttgtatatgaaaaaataaaaagtacagtgccgctgtccttttatacagcaggaaaggctgttgaacgtatggaaaagcagataaaataggggcagtaatagagaaaacaaaaatgtatgcacttacatttcagagcagagaaaggattttgccaaatgactcacacagtgcctcaaaacatgaaagcggcggttatgcacaacacgagagaaatcaaaatcgaaacagtgcccgtgcctgaaatcaatcatgatgaagtgttgattaaggtgatggctgtcggaatttgcggatctgatctgcattactatacaaatggcagaataggcaattatgtagtggaaaaaccatttatcctcggtcatgaatgcgcgggagaaattgccgccgtcggattgtctgtcgatcaattcaaggtgggagaccgtgtcgccgtcgaacccggtgtcacatgcggacgctgtgaggcgtgcaaggaggggcgttataatctttgcccggatgtacagtttttggcgacaccgccggttgacggcgcgtttgtccaatatatcaaaatgcgccaggactttgttttttcgattccggattcactatcctatgaagatgcggctttgattgaaccgttttctgtcggcattcatgcggcctcgagaacgaagcttcagcccggttcaacggttgcgattatgggaatggggcctgtaggattaatggccgttgcggcagcgaaagcatacggggcaggcacaatcattgtgaccgacttggagccgctgcggttagaagctgcgaaaaaaatgggagcgactcatgtcatcaatgtccgggaacaggatgccggtgaagaaatcaaaacgatcacgaatggcagaggcgttgatgctgcctgggaaacagcggggaatccggcggcattgcaatccgcactggcttccgtgcgccggggcggaaaactggcgattgtcggtttgccttctcagaacgagattccgctcaatgtgccgtttattgcagataacgagattgatatatacggaatcttccgttatgcgaatacgtatccgaggggaattgaatttctcgcttccggcttagttgacacgaagcatcttgtaacggaccaatatccgctggagaagacgcaagaggcgatggaacgggcctttcaatacaaaaatgaatgcttaaaagtgatggtgtatccaaatcgctgagtgaacggggaggatctttgcattctccctcttgcctatcaaaaatgaaaacggattcttggggtgggaaatgatgattgaaacagaaaaagcagcggcagtaaagacgaaatatcgcggcctgtcctggatggaacggatcggctacggattcggcgatatgtcgtacaatattatctttcagtttgtaaacgcatacttgttattctactatacagacgtcggcggcattaagcctgcggtcatcgcagctttgtttcttatcgtaagggtgctggacgctgtttttgacccgattatgggcgtgattttagacaagacgaatacaagatggggaaaggcaaggccgtatcttttgtgggtggcgtttccttttgcgctatttacgttcttatgcttcacgacccctcatttcggcgaaacggggaatatggtttatgcgtacatcacttatattctgcttgggatgtccttcagcatgcagacgattccggtcaacagcttaacggggcggatgacgaattccgtggaggaacggacggttctgacgacgacccggatgattttagtttatatcggaattctgttatcgatttcctgtgcgacaccgcttgcggacgccatcggcgggaaagatcaggcgtttggatttcagatgacggcgcttatctatgcggcggtgagcatcgcattgaatctgttcagtttctttactgtgcgggaacggattcagcctgaaaaaagaaaaaaacaaggagtgaaaaagacgttgtctgttttgttccgaaacaagcctttgctcattttggtttctgcatttttggcgtttgcgattgggtttaacattaagctcagtacgatggtgtactattttacgtataacgtcagccataaggaatttgtgtttttaggaaccgtgttgtttttcggcgcagcgctgatcagcaatctgtttattcctttcttttctgagaagcggggccggaagcaggttatgatcatcacggcggtgctatcgctgatttcttatgcgggccttcagtttacatcgtattcttcgctgccgcttattttcttttggcttttcgtttcgggatttttcacgacgcctttaaatacgcttgcttggggaatggttgccgattgtgtcgattatgcggaatggaaaaccggagtccgggctgatggcgtggtgatctcgagcatgagtttcatcaataagctcggagttgcgttagccgggtcattttcggccgtttatctcggaatcgccggatatgccgcgaataccgatcagacggcctcgtcattgaatgcgattaaaaatatgaatgcgctcattccgggattgttcattctgctgtctattattcttatttctttttatcctttaactgaaaaaaaatatcagcagatgatgtctgatctggagcaaagggctgccagataagtatacgtaaaatttaaaatattctatgtaaacggttgtatttatgacagaaagcactatactgaaactataatcgagaattgataaatgagtgtgatgatgtgagaagccaatctgttatttgtattggagaattgttaattgatttcttttgtaccgatgtggatgttgatttgacgaaagggcgcaacttcttaaaaagtgccggcggcgcaccggcgaatgtgtcggcagcgattgctaagctgggcggagacgcggctttcagcgggaaaacaggcaaagatccgttcgggtattttctgaagcagacattggacgccgtacacgtcgatacctctatgctcgtcatggatgagaaagcgcctacaacgcttgcgtttgtttcattaaaacaaaatggggagcgcgactttgtgtttaacagaggagcggacgctttgtttacgctggatgatattgatctggaaaaggtaaacgatgccaaaatccttcatttcggatcagcgacggcattgttatctgatccgttttgctcagcctatttacggctgatgtcgattgcgaaagacaatggacagtttatttccttcgatcctaactaccgtgaggatttatggaagggaagagtttcagagtttataaataccgcaaaaaaagctattgccataagtgattttgtgaaagtcagtgacgaagagcttgagatcatcagcggtgcgaaggatcataaagaaggtgttgcggttcttcatgagctcggggccggtattgtggcggtgacactcgggaaaagcgggacccttctttcaaatgggaaggatattgacatcattccgagcattccggtgacatcaatagactcaacgggagcgggagatgcgtttgtcggcgcggcgctgtatcagctggcgcgcacggatgagattcagacggcagccgatgattttgcgaagctgcgtgatattgtctcatttgccaataaggtgggggcgctcgtgtgcaccaaaatcggtgcgatcgatgctttgccgagtttaaaagaggttgaagtatcactgtaaaatatcgaggatgcttcttgaaagtcatcggacttcgggaagcatcctctttatttaggtctgaaacccttttcgatatacggtatactttagaaaggcatccagtaaattgaaccgctgtgaagttcatacaataacttttttatcagttctgagtaaaaccaagtttctgctgctgccgtcatgtatagtgtgacggcctgtgatattgaaccgcggaggaatgtttttcatgaaacatgtttttcttattgtgcaatgcgcgttttctgttttttgttttctttgtctcgccgctgtcaattggtatcaggggagtgagcttgtttctgattcgtttgattggaattatacggctaaattttcaaagcttttgaatgggacggatacgattacaagtccggaacagatttcgcagctggatttctttgtgtatgcggcgaagcattacccgttagtgagcgggttgatgatcgcgctttttatttattttttgttctcactgtatctggtcgtaaagaatttccgccggcacaaatgggctgaatgagactattttcatataaaatacataaatttatgagaaaatgaaacttttttcgaaaaaaacagtatagataactatgaacttgttactatttaattttgggaggaaaatgaaaaatgagtattttaggaagatttaaagacatcatgtcaagcaatatcaatgcgctgctggacaaagctgaaaaccctgaaaaaatggttgatcaatatttgcggaatctgaacagtgatttaggaaaagtgaaagcggagacggcttctgtcatggctgaggaacagcgggcgaaaagagcgttaacagaatgccaggctgatgccgaaaagatggaaagttatgcgatgaaagcgttgcaggccggcaatgaagccgatgcgcggacgtttttggaaaggaaagcggctgttgaatcaagactgactgagctgcagacggcttatcagctcgcttcttccaacgcgtctcaaatgcgcaaaatgcatgacaagcttgtcgctgatatcggagagcttgagtcgcgccgaaatgccatcaaagcgaagtggtctgtggcaaagacgcaggagagaatgaacaaattggggtcctctgtgtcaaatgcgggccaatcgatgacagctttcggcagaatggaagacaaggtcaaccaagcgcttgatcatgccaatgcgatggctgagctgaacgcgtctccgaaagacgatattgacgatctgacggctaaatatgacagcaatcaaagcagtgtcgatgatgaattggcggcgcttaagcagaaaatgcttttcagtaaagatcaatagacagcgggctgcagctttgtccgatataaagagaaagtgagagaaacagaatgatcatttcttataaatgcccgaactgcggcgatgatatggtctttgacagttcatccggcatgctgacatgtcacagctgcgggcggcaggatcagattgagagcctgccaaaagagtatataacgacgagattttctgaaaatgaggcgaacgagtaccggtgtgagaattgcggtgcggtattaatgactgaggcggaaacgacggccacgacgtgcgggttttgcggaggagccgccgttctcgccgaccgattatcgggaaatctcgcgccttcgatggtgattccttttacgatcagtaaagaagaagccatgagcgcttttaaaaagtggtgccgaaacggccgtctgacaccgaaaggatttatgtctgctgatcgggtgaagagcataacgggcatgtacgtgccgttttggatgtttgatttaaacagcaaggttcaggtcaatgccgtttgtacgagagtgcatcactatgatgatggagaataccgggtgacggagaccgagtattacaacgcgtaccgcgatatcaatcttgattatctcaaaattccggtcgacgcttcagaaaaaatgagtgatgaattaatggacaaattggagccttactcatacagtgagctgaaggagtttaatacggcctatttagcgggatatatagcggaaaagtacaattataccgatgacgatctctttccgcgggcgaaggataaaatcagccattatattgattcttatatcagatccaccttctccggatatacgacggctgacattacggatgagcagattcagaccgataaaatcagcagcttttacgtactgcttccggtctggatggtcagctacgactatgagcgggctgagcacatttttgcgatgaacgggcagacgggcaaggttgtcggcaaaccgccgatcagtgccggaaaagtggccgcgtggttcggcggcataaccgccggtgcgtttttagcattaagactcgtctcacttatgataggaggcggtttttgatgaaagtatcgataaaaaaagcgtgtctcttctgcttcgtcctttttctgatgctgtcttttggtttacatacatcggcgtctgccgcggaacagaagcaatatgtttatgacaatgctcatttattaacgaaggatgaaacgaagaaacttgaggaattggccgggaagctcggggcaaagcgccataccgattttatcattcttaccgcaaacggaacgggcggtaaggacatcgagcagtacgccggtgatttttatgacagtcattttagcggaaacacggcgattttgaccattgatatgaaaaagcgggaagtatttatctccggatataaaaaggcggagacgtatttgaataacagccggctgaatacgatcagaaatacgatctcgtcagatatttccgcaggccattatgaaaaggcgtttcagacctacatcaagttggcttataaagatatggggaaaagcccggacgacaagtctgacaatctgctgctcacatggtggtttcagctcattattgccgcagccgcggccggcatcgccgtcactgtgatggtgtacaattccggcggcaaggtcaccgtcaccggcagcacgtatatggatcacgatacgtctgaagtgctgagccagcacgacacatatatccgaaccgacgttacaagagaaaaaaagcctgataaagataatgacaatgacggcggagtcacgaggggcggcacgagttacagcggaagcaagggaagtttttaaattatatgtaaaggatttgagcatacatgggttttttcagaaatcagttagcaaatgtggtggaatgggaagaattcagagatgacatggttttctataaatggaacaaccgtgaaattaaaaaaggcagccgtctgatcatccggccgggacaggatgccatctttttatacaacgggaagattgaagggattttccgtgatgacggcgattatgatatcgaatcagaaatcattccgtttctatctacactaaaagggtttaagtttggctttaacagcggcatgcgggctgaagtgctgtttgtgaatacgaaggagttcaccgtgaagtggggcacaaaaaacgctatcaacattccggcggcaggtatgccgggcggtatgccgatccgcgcaaacggcacatttaacttcaaggtcattgactacatcggattgattgataagattgcgggtgtcaaagacagctatttagtggaggacattaaaatccggattacgtctattctcgatcagcttttgatgaaatggatcaccagagaaggaaaagacatgttcaatctgcagtcgaattcctttgaaatcggaaaagggattcaagaagatcttgatatgcagctgatcggagacggcatgtcgattacgggcttcaatattatgagctttaattatccgcaggaagttcaggatatgattacgaaaaacgcttcttacggcatggtgggcgatgtgaaccgctatcagcagatttccatgacggacggaatgtcatccggcaaaatgagcggaagcggcgccgcctcagacatggcgggcatgatgatgggaatgaatgcggcaaatcaaatgatgaaccaaatgaaccaaaatcagcagaaccagccgcagcaaaatcaaagtcagcagaatcaggggacggcaccggcgaacggctcggaaggagcggctaagccgaaattttgtccgaactgcggaacgaaaacggaaggcgcgaatttttgcccgaattgcggacagaagcttgcctgacgatatacgaaaaagaggcctttttggggcctctttttttgtcatgatttcattgtttgaacgatgagggatgtcagcgctttagacccctcaggtatgagatggacgccgtccggtgtgaagtattcagggtgctgcaatgcttttgcgtgccaatcgacaagcgtcacatttttgcgagactcggcctgccggcgcaatgattcgtttactttgctttcccactgccgcggcacacgcgtgttgacaagatagatatcggcttttgaaaaagagctgatcagtgattcaatttggctgtttgtgaaatagccgttcgtccctaactcgatgatgaccgctttgttcggctgattaaatgacgcatattccgaagtgagctggagtgcttgagagacttgtcttcctacctttccgtcgatggtgacatgagggagggactgccgcaggtatgacgcaatgtccagcatcaccgagtcaccgatggccagcacgtcttgctgaggctgtgtttgttttggatcagccgttttttgggatgactgttcctttttctcttcgtttttctttgtgtttgatttgtctgttggttctttcttgtttttgtttgacgcggtgtccgttttttcgccgccgtgttttttcttgctgtcatcttcttttgccggttgatcgtgatcggccgttttgtgcgaagaggcggcggtttcttgctgatcattttgcgcgtacgtccattgcggctgttttttctcttcggctatccctgacagcccgcccgcaaatacgagaatggcggcaagaatgaggccgagcgacattctgctgatgacagaggatgtcttccattccagaaagcgattcagaaacacgcggcgtaaaaatggccggaagcccgcagtgcggatcggctgttcaatgaaatggtaagaaagctcggcaagaatgaaagtggcaccgattctgacggcgcagtgccaataaaccggatttccgatttcctgcacgggtgtgctcagtacgataaccgggtaatgccaaagatagattccgtatgatctcgttccgatccagcgaagcggcttccatgaaagaacatgtcccaaaaagctgctcggatggcataaacatgcgacaagaaccgctgcggtgatgctgatcaaaagcatgccgcccttgtacaggaagggttcatattcatccgtgtaaaagacgcaaagcagcagcgcggcaaaagcggcaagctccgtcccgtgaagcaggtgtttcatgctgctcggcagccgtttggaagataatcgtttcatcggccacactaaagctaaagcgcagccgatcagcaattcaaatgagcgggtatccgtcccgtaataaatgcggctcggatctccgccgggcacatacatcatactcattacgactgccgaacataacgcgagaaacatgaccgcggccgcaagccgggcccgtgttttacatatgtacattcccgcaagcagcaggaagggccatatgatataaaactgttcttcaatcgccagtgaccaaaggttttttaatggcgaaggggagccgaagctgtcgaaataagaaagctgatgaaagataaaccaccaattgcttatgtaaaaaagtgaggagaccgcatccccgcgtacggtatgcaggagctcgctgttaaacaatacgacccaaatgaccgtcgtgataatcatgagataagccgccggcagaagccgcctgatccggcgcacccaaaaatcacgcaaatcaagggtgatggcattgccttgggcaggcaatataatagatgtaattaaataccccgataaaacaaaaaagatatcaacaccgatgaaaccgccgtcggcccagttaaaattcagatgatatgcgataactgcgaggacggcaaaggcgcgaagtccatccagtccgggaatatagcggtgatgcagtgacttgtctgacatggtattcctccaataatgtgtgcggaaattctcgctgttttgcggatggctatggcagatttctgtacagtcttccatttgttccgttaattagacgcattcggaaggggattttgtttcagaaaaaatgaatgaaatgctgtgattttcttaaacttttcagcccccgtccggtgtctgttatatgaaaagggtcccatatgcatcttggctgttgcgggacgaaagaaaaaatccatgatctgcggatatcatggatttttttctttctttatctgatgtagcggtctccgacaagcagcttggagatgacggaggtcggtattgtaaactctgtaacgcccatatatccgggtgccgcttcatattcgtcaaatgaaataacaagtttgtgcttatctgtaatataaaaattctggtcggcgcggatggctttaaaaggctccgtcatatcatcatcttcgacccagtatattttattcggatcttctttcatctgttttttcatttgttctttaatattttcgctgatgactttaatataacggtcatctttaaataaactctttaacgtaagcacggcctcattctttttatcaatcgtgatgtaacggctttgcgtataagatgaagcttgtgttttttcgatatcacggcggattgagatcaaatccgctgtgtcagtaacggtttcataatcgctgtaaatactgaggtggccttttttgctttttgaggtcgccttcataaattcctgatacagctctttgctttctttcatataatgccgattgatgctgtcttcgagtttatgatcggaaagtccggacagagcgggcgttttcacatcaatgcttgattggttcttttcttccttcatctccgtgaatgtgatggcttggacgactttgccgatgacggggattttagacatggcttgtgcggcatccggattgatattgacaacggcggtaaataagacggccgcagcgactgccgcggatgtcggccacatcacgattcgttttttcttcggtttctgctgaagggctttttcgacaatgctgtccagttccttaggaatgggcacacttttatactcttctcttaattgttctaatctcttttccattaagaaagatcctccttcgtcagctgaatgcgcatgagcttcagccccctgtaaaggcgtgttttgacggtgttgatgttttcccccgtgatgtccgcgatttcttctaatttcaggtcttcaaagaaacgcagaatgataatggttttatattgatgcggcaggtcatcaagcgcttcgtgaaggtctgtgtctttgtagtgatcttcctttccgcggcttaaaaactcgatcgtttcatcgtccatcactttcagttttttctgtttgcggagaaaatcaatggccgtgcgcactaaaattttataaaaccagcttttgatcacatcggggtttttgacggattcgaccgatgtcagcgctttttgaattgattcttgaacaatatctaacgcgtcatccttgttctttacgtaactgtacgccagccggtaaaagtcttccttgcgctcagttatgcacgtcacaagcgacgctttggctgtttcgttcttcattgcttcaaagggctccttttttaaaaatacgtatcataggctgctgcctaaggatagacgggacagggtgaaaaatagtttgcgcagaggggatcatttttaaaaggaaaaggaaggaaagacgatgagatgaaaaaaagagccggaacggctctttttcggatgtgtctgttattcagctaaacgatttagttcggtttgactaagattttcacttggtttttctctttgattagagcgccgaagccttcttcaatcagatcgtcgagcacgatttttttcgtgacgagcttatctgctgagaagtagccctctttcatcagtgcaagaacggaagggaagatgtcacggtatccgataatgccttttacggtccgttctttgataacgatatcgttcggatgaatttccgctcctttttcccaaatgctgacgataaccgtttcaccggcaatgtttgttgactggatcgcctggcggagaacgacaggaacgcctgttacttcataagaaacatcaacgcctccgtttgtgcgtttagcgatttcttcaacgacatcgtccgtttttgacggatcaatgatgatagcgccgagttctttcgctttttcctgacgttccggtgaaagttcaaccgcgtaaatatctgtggcgccggccgctttcaaggcttcaatcacaagcagcccgatcggtccgcagccaaaaactgccgccttgtcgcccgcttttaatttgctttggcggacggcgtaaagcgctaccgctgacggctcaacaagtgcgccctgttcgtaagaaagctcttcaggaagcttaaacagcaattcttcgtcaacggatacatattcagaaaatccgccgccgcctccggctaagcctaagaatcccatttgttcatcaaggttataggctccctgatgtccgtgtgtggcaaaaatcggttccacgacgacacggtcgccgacgctgtaatttttgacgccttcgcccacttcaacgacttctcctgagaattcgtgacccatcgtgacgggcgccatttcgtttgttaacggatgaggtttgccgaccggaataaagatcgggcctcccaaatattcatgaaggtcgcttccgcaaatcccgcaccatttgactttaattttgactttacccggttctgctttaggttcatcaatgttttcgattcgaatgtctttttgattgtgccatcttgccgctttcattgattatcactcctagtctgattgaaacgagtataggtacatgatcaatatgaaccacggttaaaaggaataaagtgcctgcttcctaaagcctgatttctcaaaatatatcatattatgcaactatcaataggccttataaaaagtccatattgaatgcagaaatactctatgaatattataacgctaatgaattaaattttgtagtataatttaccatggaattatatagaacgggaaattgtgccatcgttatgtgcatgtctcatcacgttgtaatgaacatgtaaagtgattgaaatattataatcgtcttcttggtgtataattttgcctagaataaagaatcaggaggacgaaagcttgaagaagttattcttagccttattgattttagcaggaagcacgctgggagcgatcagttactcttctgatgcaagcgctaaaaaagtgaacggaaatattacatggtataatggagtcggtaaaaaaggatcttccggtaaaaaactgggacactgggattgcgcgacaaaattaggatttgacgttccgagaaacggaacgaaaatcagagcttatgcgaaagcaaaaccgaaaaaggttatcaccgtatacaaaaatgatgtaggccgtctgccgaatgccgtattggatgtcagcccgaaagcgttcaaagcgctcggatatccattaagcaaaggaagagtatccggacactacagctattaaaatagaccatcttaaaaagcaaggacactgattcttgctttttctgattgacggagagattgataatgaagaagaaacgatggatctggatgttgctggctgccgttttggcggcggcggtcatcgcgtccgttttactgattaaaggaaaaagcgacggcggcgggaaagccgttgtctccggcggccatgacaagctgcttgtttccattacagacaaagatctgatgacgaaatattacaaggacggccgcgtgctgtacgaggaaaagctttcggcatatccggcgtttgcgctggatgacgcccatcaggtgctctattttgtcgggaataatgaccaaaatgagatgcgtctctataagcttgatctgaagacgaaaaagaagacggtgctttataaaggaacggcaagcgctgacagtctgtttttatcaaaggatctgacgcacatttatttccgtctcggaaaagcggatgaagatattttccgtctcgcatcttttgatttgaaaacgaaacgttatgaaaatctgtatcccgccgccgatgagaaagatgacagtgtaagcagcttcttttataaccggagccaaaacgattttgcgcttctgcattattccgtaaaagaggattatcaaaaaacggatgaggcaaatgagaaggggattgaccctgaaccgacgaatatccggtttgcagcaggagcgggcgaacaccttcaggatttgacaaaccttgaacagtttatcagcgacgtggcggtgtcaccggacggaaagaaccttgtctttacatcttatacccaaaaagggacggaacaaaaagcgtccatccgtctgatgaatgtcaaaacgaaaaaagatgaaacgattatctcaaacgggaaggacttcgctccgctgattgatgcccagcctcagttttctaaagacggcagcatcatttatttcatggcggaagcaaaaggcgctaagcgcctgaaggatgaaacggggcggaatgcgaaggtccggaccatttatgcttatcatttggatacgaaaaaatgcgaaaaagtctgggaaaatgacaacggcattatcaacagtttttccgtcatccaatcatgaaaaaaacactcagcgcccgctgggtgttttttaatgaacaaagctggctgcggctgaggcgagccatttgaaaaaacggagaatcggaacggcaaaatgaagcgtttcgatgaatgactgtgcggcaaggttcattttccgccgttttgccatttccttcagatctttctgctgccgatcgtttttcatgttcattgctcctttgcatcataaaaggacatgatatcgcaaaggcctctcatgagacatggaggccttctctatgttgagactcgtaaaagggaggtctaacttgatgccgtttgattattgttttggagatttaccaacgaacggacgccgtcgatcattttactgccgcaaagggggcaagtcggggtatcactgccggcaaaattctttctgctccagccgatacagtcctcttttgtgcattcccacgtactgacatcttctttaggcagcggttcctgattacgtttgttgtagtaagacataaagtcacttcttcccttatgaattttcgtgcactccttcattgtctcatacttttccctaatctcctaattcctttttctatccagatttccaatgagggtgcatcgtcttcctgttattacagtatatgcaaataagtgtcttcttattttttctttttggataaataaaaaagccccttctctaaaaggggtgatatttgtttactgcttatccgtgacgtccatcggtctcatcatgtcgtaatcttcatgttctaaaatatggcagtgccatacgtagcgtccgctgtaaggagcgaaggtcgccgcgattctgatgacctctcccgagtgcgcctgcacggtatctttccagcctttctcacttggaggaggcgggacggcggggcctgtatacacaatgtcgccgaatttgttataacgctctaagtcaaaaggacgccggtcaaggatttggaaggaaacaaggtgcaagtgtatcggatgggttccccccatcggattaataatcgaccagatttccgttgtgccgagcttcggcgcttctgtcacaggatcatgccatcgcttgttattcagcgtcaaaacgggccggccgtatttgtcttgcgtatttgtaagtttaagcgtcctgatattgtgtattctctttgatgtcacattaggcattgttgaaagatatttaggcttccggcttgtgtctgctcccttcagcgcttttgtgacgcggaattgcatcacattggcgtctgtatccggatcggcgtcgcccccgcagccggtgccgttcgttaaaatgatatgttctccgtcaaaggcggagaaatcgatgagcacatcataccgctctgccggggctaagctgatagattgtgttttgacagagcggggaagcaacccgccgtcagaaccgatttggataaacttcccgccgttattgagcgagagagaaaatgttctcgtattggaggcattaaggatgcggaaacgatatgtccgcggttcaacttccatatacggccacgctttaccattgacgagaatggtatttccgcaaaaaaacgggacgatggaagggtcgggcagcgtttcagaaggggtagcaggcccgctcggataagacaaggaaccgtcgtcatttaacgtgcggtccaaaatcataagcggtacgtcgtactctccggagggaagcttcagctgcttttcttttcgctcgcggatgatatacatcccggcaagcccggcgtacacattgagcctcgtaatcgccatggcgtgatcgtgataccataacagagccccgcgctgtttgtttggataatggtatacctctctctcaaaataaggacccgtttccttaaaatcctttgtgaaccatgcttccgggtagccgtcgctgtccggcggcgttgctcctccgtgtaaatggacgacggttttgacatcgggttcctgatggccgctttctgaatggtgaatggtatgatccacgggcagaaaatgcttatccggaaggtcattcatccatttaatatagacgttttcatcttggttcacgtcgatcgtcgggccgggaaataaaccgttatacccccacagccgggtcggcgggagatcgcggtgcagcttgtgaaagcattccttcatggtgacttcataatacgtgctgccgtctgatttcttctgcggctggagtgtttcgataatcggcagttcatctgcaaatttttctagtgccatttttcatcctgtccttatcatttattgaaatcctgtactacagttaatgctgcctggaacaggttggttaaaaaaacacccgccctttttgaggggggtgtttgcggttattgcgcaatccggctttcggaggcgctctctttcggtttttgttttttgcggaatacataggaggcaagtaccagcagagtaataaatcctgtcagcagaaattcagaccgcattgaactgataaacagcatagataacaagatggcgcaaatggcgatgatcgtcaggtaggttaagtacggatagaaccacattttgattttaagagattcagggtttgtccgttcgattttctttctcattctcagatgtgagacggcgatgacgagatagacgagcagtgcgatcgcccctgatgaattgaccaggaacaaaaatacggagtcgggagaaaagtagttcataacaacggcaatataggagaaaaaggtgccggcgataatggcttgaaccggtacgcctcttttactcagtttcataaaacgccgcggcgcttcatttcgctctgccagtgaatacagcatccgtgacgtcgtataaagcccggagttcaggcaggacagaacggctgtcaggacgatgaaattcatgatttgagcggctgcgggaaccccgatatggctcaaaacggcaacgaaggggctttccaaaatattggctgaatcccacggcagcagtgtgaccacaaccgcaatggaaccgacgtaaaaaataatgatccgccaaacgactgagcgggtcgccttcgtgacggattcgaccggatttgacgtttctcccgctgcgattgcgacgatttcagatcccatgaaagaaaaaatgacaacgacgatgccgagcagaacggaacttggacctttagggaaaaatccgccgctgcccgccagattttccagcccgaccggtttgctgccggggacgattccgaaaatgaacgcaaatcccgcgattaagaagacaacgatcgtcgctaccttcactaaggaaagccagtattcaaattcgccgaacgatttaactgaataaatattcgtcagtgttaacagcacggtcagaagcagactcgtcagccataacggaatgcccgggaaccagtactgtatgattccggcgcctgcaatggcttcaatggcaatgacgatgacccagaaaaaccaatacagccatccgatcgtaaaaccggcccaaggaccgatggcgtcatgcgcgtactgtgaaaacgaaccgcttgtcgggttgacggaggacatttcccccagcattctcataataaaaatcactaataatcctgctaaagcgtaggagacaatcgctccgggtccggtggaatgaatgacggatccgcttccgacaaataatccggcgccgatcacgccggcaattgaaatcatagtcatatgccgggtttttaatccctttgataaagagttaggctgattcattctttgcctccttttggtttgtttatgctgaatattccgacaagtattattctatcataaatgccacaggcagttgaaaatgatgtaagaaaatatgacattttttctcgtccgtacagcagaaggtgccggaaggaaaagaaataattttctgttatttctgtgttttaatggttttgaaaataattccatgaacatgggttggcgagaatccttgatacgattgggatgagaggggttttgtgaatgaaaataagtttcctgagcgcataaatgttccatgcttactatttttctgtggaaagtgaatcatgtttctatagacccactgtgtcctcgctttgtatgataatgaaggaaaaattgaacgggaaggaggattttcagtggagagatatcatgaattgaaaaaaggcgaaaccggagcgattgtcagtattggcgcatatgcggcattgtcggctgtgaagcttgtgatcggttatttgtttcactcagaagcgcttcaggccgacggtttaaataatgcgactgatatcgtggcatccgcggctgttttcatcggtttgcgcatctctcagaaacctcctgacgaagatcatccttacggccattttcgggcggagaccgtcgcgtcactcattgcttccattattatgatgcttgtcggaatgcaagtgctgttcagcgccgcgcaatctattttttccgttaaagaggaaacaccggatatgatagccgcctggacggccgcggggagcgccgtggtgatgctgatggtctgccgctatacgaaagggcttgcgaaaaaggtaaacagccaggccctttcagctgcggccgctgataataaatcagatgcgctcgtcagtatcggcacgtttatcggaatttttgcttcacagttccatttggcttgggtggatacggttaccgcgtttatcatcgggctgatcatctgcaaaaccgcgtgggatatttttaaggaatcctctcattcgctgactgacggttttgatgtcaaacatatttctgattataaaaagacgattgaacagattgcgggcgtcagccgtttaaaagatattaaagcgagatatctgggcagctccgttcatattgatgtcgtcattgaagtgccgtcagatctgaacattaaagagagtcatgagatcgcaaatgaggtagaacgcaagatgaaagaggaacatgccattgaccattcacacgttcatatggagcctctccagctgaaataaagcttcctttctaaagggagctttttcctttttcagactggaaacaattcgctggaaacgtttttttatactgtttatattttgtggtaaagttaggttacgataattgaaatttgagagatgactaggaggagaagaatggcttataaagaagagctgcatccgctgctggagaaagccgttgagcatattgaaaacatcatcataggaaaacgggatatcgccatactcagtctggccgccattctcgcaaaagggcatgtgctgctggaagacgtgccgggagtcggaaaaacgatgatggtccgcgctttggccaagctgatcggagctgactttaagaggattcagttcacgccggatcttctgccgtcagatgtgacgggtgtctctatttataatacgaaaacgatggaatttgaataccgccctggaccgatcatggggaatatcgtgctggctgatgaaattaacagaacctctccgaaaacgcagtcttccctgcttgaggcaatggaggaagggaatgttacgattgacggaaagacaatgcggctggctgagccgtttttcgtcatggccacacaaaacccggttgaatatgaaggaacgtatccgcttcccgaagcccagcttgaccggtttttatttaagctgcgcatgggctatccgactgccgaggaagagcttcaagttctgtctttgcaggaagggcgcaatccgcttgaaacaatcgagcccgtcatttctaaagaacagtttatcagccttcagcaaaaattggagcaggtgcgggtggatgatggaattaaagcgtatatcgtcggcattactcagcatacccgccggcatccgtccgtacatctgggcgtaagtccgcgcggttcaatctcattaatgaaagccgcgcaggcgtacgcgctgcttcatgaccgcgattacgtcattcctgatgacgtccagtatttggctccgtatacgctgccgcacagaatgatcttgaccgccgaggcgaaatttaacgatgtgaccccggaagcggttatagaagacatcatgcaaacggaaaaagtccccgttcaaaggatgtcggtccgctaatgagaaagaagatgcattggcttctatatggctggaagctgcttatgttggccgtactgacggcggctgtcttttcttatgccatgtttcagggcggatttgtgagctggtttttattttatgcgtttttgccgtttaccgtttacgccgggctggtcgctgtgtacccgctgcgggcgtttcaggtgacgcgtgacgtgtcctctgcccagttaacctcaggcgacaggctgtctgtcaccatcaggctgacgaggcgcctgccgtttccgctgacatatatggtcattgaagatgtgatgccggaaacgcttggcgagaggcgcagtgcgaaacagctcgtgtttccgtggtttcaaaggaagctgacgttacaatatgagctgccgcaggtgccgcgcggagagcatcatttacatacgataagagtgcggacgggagatgttctcgggcttttggacaagacggcgtcgttttccgttacggatacggttctggttttcccggcgtacgggtctgttcactataagccgcaggtctcatccggagaagagggtgcggctgccggcgctccgtttcaggtacaccgctccgcaatggctgcgagcgtcagaaattatcagccgggcgaccggttttccgcacttgactggaaaacatcggcgcggcgaaatgagctgatgacgaaggaatttgacccgctgcagagtgtgaatatgattctccttttggactgcaggccgtccccatcgtttgaagccgcggtatcagcttcggcatccctgctttacacggcgcttgtgaagggctctcccgcaggatttatttcattggggagcgaccggaccgtatttcccgtccgggagggagaccggcatttcagaaagatgctgcgttacctggcatcagcttcagaatcggaagaagccgatgcaggcgggcgtttaggaaaagagctggcggatccgcgcgtccgcaaagcttccattgccgtcgtgacgggcagtcttacagaagaccttctcaaacaggctgagcccggccgtgctgacatgacggtgtttttggcgaaagaaacgaatgccgcgctttcggagaaagaacggaaactcgctctcatcttcgctcaaaaaaatattaaggtgcaaatgatcagggacaaacgggtgtcccatgttgtttagaaagagaggtggcgcgccatgccgcatgacgagaaccagggaagcaggctgagtctgctgctgttttattttctcgcttttttattgttatgggaatggctcaggccgctgcacaattttacagatacaaaacataccggttttttcatcgtttttatcggtttggcatttctgctgtcattcttccggatgaggtggtacgtcaccgtgccgtcctgcattctgtttacgttgatcagtattcacatcctgttttataaaggttcggtttttcagccggaatggctcgtttcttttttgcgggacgtgatgcaaaatgcccgccacatcgggaccggaagatggaatgatatgaatccgtcattccgcacattgctgttttttgtgcttttatggctgctcgtgtatttgctgcattactgggtgatctatcagcggaaaatattattcttttttatcatgacggtggcgtatatcaccgtgcttgatacgtttactccttatgatgccgcgtacgccgtcatccggatcgtctttatcggctttttgatgatggggcttttgtatatggagcgcatccggcttacggaacacatagcgtttaaaaaaagattgatactcaaatggtttctgccgctgatgctgtttatctgcgcttccgtcgtgttcggtctggcggctccgaaatcagacccgaactggccggaccccgtgccgtttcttaaaaaaataacaaaccacaaagaagtgcccgccgccgaaagcaaaatcggctacggcaatcatgatgaaacattgggcggcccttttcagcaggatgatacgccggttttcacatggaagggaaaagaacgggcgtacttccgggtggaaacgaaggatacatacacggggaaaggctgggtggagaccgatcagggcatgtcctataaactgaacggcggcaacgtggaagatatatggtttgaccggagtgtgcagacgagacggtatacggcacaggtgtccattgatgagaattatctctataatcacgtcatgtatccgatcggcgtctccaatattaaaccgaagcactcgattcagcttgaaatgaacggaaacaccgagcaaattacgccggtcagtgaacaagtgggcaacatccgcaatatgggacggtacacggtgacttttcaggcgcccgtctttaagctgaatgatctcagaaaagtgaaagtgaaacgataccgtgagcagaatcaattcaatgaccggtatttacaggtccccgacagccttccgaaaagagtgagacagcttgcggacagactgacgcgggatcatcataatatgttcgataaagcgaaggcgatcgaggattatctcggatcttccgcattttcgtataatacacaggatgtcgcggttccggagcacaatcaggattatgtcgatcaatttctgtttgaaacgaaaacaggatattgtgataacttttcatcggcaatggccgtgctgctccgctctgcgggaattcccgcccgttgggtgaagggctatacatccggcgaatataaaggggcaggcgaccataacggccacatttatgaagtcacaaacaacaacgcccattcgtgggtagaagtgtattttcccgatcagggctgggtgacgtttgagccgacgaaaggcttcaccaatccgacggagtttacgtcagagcaaaatcataccgcggcaaaagacagcggaggctcagcgggaaattcggatgaaccgtctgacaagcagcgtcaggaaacaaagccggaaaaagaggaaacaccgaaaaagcgggatcacagcgcggcaccgcagcctgtgatccgcaacaaaaccgcggcacagctatggtcgtatgcagccatcgtcatcgtgatttcagccgcggcggcactcgcctggctgctccggacgcgctggattccgcacgttacagcagccagattgaagcggcgtacggatgaagacgtctttttcgacgcatatgccgcgctgctccgccagctgaaacgaaaaggattcagcaggggagacggagaaacactgcgcgattttgctgcgaggattgacgaggcgcaccatacaaacgacatgtccgagctgacgctgctctatgagcgggccttataccgcagggataatgccgcaaagctttggaatgaatcgggacagttgtgggaaaatataattaaaacaagatagtcttgaccgcatatcgtcctgttgttagaataaatgaatgttaaatgggagcccgggagcgttaaaaagccgggcttccgtacaagtcttgcgcgacagagggctgaacgtttgtcctccgttttttctgtgtcaaaaacttagaggagattaggtgacaaccatgacgaagttagtgaatgaaatgattcttgttcttgatttcggcagtcagtataaccagctgattacccgccggatccgtgaatttggcgtatatagcgagctgcacccccatacgttgacagctgaggaaatcaaagaaatgaatccaaaaggaattatcctttcaggcggaccgaacagtgtatatgatgaaggatctttccgctgtgacgaaaaaatctttgaactcgatattcctgtattaggcatctgctacggcatgcagctgatgactcattatctcggaggaaaagtcgaggcggcaagccagcgcgaatacggaaaagcgaacattcagattcaaggaactcctgacttgttcaaagatcttccggaagaacaggttgtgtggatgagccacggcgatttggttgtagaagttcctgaaggcttcactgttgacgcaacaagccatcactgcccgaattcagcgatgagcaaagcggacaagaattggtacggcgttcagttccacccggaagtgcgccactctgaatacggcaatgatcttctgaaaaactttgtattcggcgtttgcgattgtgaaggcaaatggtcaatggaaaactttatcgaaatcgaaatgcaaaaaatccgcgaaacagtcggagacaagcaggttctatgcgcgctaagcggcggtgttgattcctctgttgtggctgctttgattcataaagcgatcggcgaccagctgacttgtattttcgtagatcacggccttctccgtaaaggcgaagcggaaggcgtcatgaaaacgttcagcgaaggctttaatatgaatgtcattaaagttgatgcgaaagacagattcttaaacaagctgaaaggtgtttctgatccagagcaaaaacgcaaaatcatcggcaacgaattcatttacgtgtttgatgatgaagcggacaagctgaaaggcatcgattatcttgcgcaaggaacgctttacacggatattatcgagagcggtactgcaacggcgcaaacgatcaaatcgcatcacaatgtcggcggacttcctgaagatatgcagtttgaactgatcgagccgctgaacacccttttcaaagacgaagtgcgcgcgctcggcacagagctcggccttccggatgatatcgtatggcgtcagccgttcccgggccctggacttggcatccgcgtactcggcgaagtaacggaagaaaaacttgagatcgttcgtgaatcagacgcgattcttcgtgaagaagtggcgaaccacggcctagagcgcgacatctggcagtacttcacggttcttcctgatatccgcagcgtaggcgtcatgggagatgcgagaacgtatgattacacaatcggtatccgtgccgtaacatcaattgacggcatgacatctgactgggcgcgtatcccttgggatgtgcttgaagtgatttcgacacggatcgtcaatgaagtgaaacacatcaaccgcgtcgtgtatgacattacgagcaagccgcctgcaacgattgagtgggaataaatgaagataaaaaaacgtctcttttaaaaaagaggcgtttttttttcatctttttgaaaccgttttgccctgattcatatctaacagcataggaggtggataaggtgaaggaagaacgattgatcaaaaaggcgaaaaaaggtgatgccgcagcctttgaaaaactgatcacagctcatcaggagactttatataaaacagcttatctctatttgcatcataaggaagatacactggacgctgttcaggaaacggcttacaaggcttttcttcatatcgcgcagctgaaggagccgaaatattttaaaacgtggctgatccggattttgcttcatacgatttttgcgatgaggaaaaagcacggagacgtcatcccgtttgagcagcaacacgatacacgcgcggagaataagaacattgaagaatacatagatcttcggaatgccctggaaacccttgacgaacatatacagctgaccattcagctttattattttcaagatttctcgattgctatgatcgctgaacagaccggtatggcggaaggcactgtaaaaacgcatctgcacagggcgagaaaagcattgaagcaggagctggaaaaggaggataaacatatatggaaaagcatcaaatgaagcaattgtatcaggacattgacgtgccgaaagctgaattgaaaaacgtgatacacagcgccgctgtccgtgccggaaaagaaggggccgtcagacggagatggggacgaaaagtgataaacggactcgcggttgctgctgctttgtttattctgtatctgtcctcaggtttattcatgccctccgttaatacggctatgggaaacatccctgttgccgggcagatttacagggtatttcaggataaggcaggttctgcgctgtttaaaagcaatttggtgacaaaactgaatgagaaagcggaatcacgcggaatcacggtgacagtgaaaagtgtgtattacgacagcggacagctcgtttacaattttaccgttgacaatttgaaatctaatgaggaggatattccttttgaagtagattataaagacagccggaatatattatctttggattatgacagtcagggcatgaaaaaagtgaaagacgggcagtacggggggcagcttcgcttttttgcggacggcccaaagatgaaagacggtgataagcttccgcttgtcattacacaaatcaaggatattcccggaaactggcgctttacactcccgattaaaaaacaaaagtccgtttctcttgaaggaacgaaagctgtgaatgtaaacgggttataccgctttttcgatatccgggcggaaaacggaacgacgggatcggctctcctgtattcagtcgactttcaagatgcagctaaaaatgatgccatctcgatttacgaggcatcagatgatgccggaaaccattatgaaatgacgatgtcgaatattgaacttggcagcagaaagaaccttcccggcggcgggaaaagaatacgcggccaaactcaattcagcaaaccgatagacccgaaagcgaaaacacttttcataacgggcgatgtaaaatcagaatcagagcctggagaaatcgtccctctgaaaacaaaactgcccgtcagttataaaacgaaacatcatcatgtcggcatcaccatcaaaaagatcaaacagcaaggcagacgggtaattgtcgattatcaattcagcggaattgatgtaagcaaaacggataaagatcagctgatgaatgtcggtgaatcaatcggtctcggcaatacgaaaaaaatgaaaacctggccatcgcttaatgagtataaaaaaggctattatctgaaaggaaataaggcgaaagtcacgaatcttaaaacgggtgaaatggaatccgtttttgaattagatgattcatccgataaagactattcgttgcgcgatttttcattcgattcatacgctttgtacgtcaatcaaacggttatgaacttgctggcggatgataaggggatcacattcgcggtgccggttcggcctgctgacggaaaatgatgtcgggaaggcggcttttgccgtcttccatttttggtcaattaacgaataaaccaaatttttttaacgggattgttcgtttttttattgagttttcaaaattgaattgatacaatagactcagaaatcaaatatgcagatatcgtataatggcggggatatggcccgcaagtttctaccaagctaccgtaaatggcttgactacggatcaatctcaatcgtttgatataaataatccattcttatttattcagactgaacgtatgtagtcaagcgtcccaaatgtatttggggcgttttttatttggcggataacgggcagaataaatgggagagaatgaaggaggcaattggcttgaagcaattttttcagtttgatgagctggggacaagctatcgtaatgaaatcatcggcggtttaacgacctttttgtcaatggcgtacattctgttcgtcaatccgctgacattgtctttaaacggtgtgaaaggatttcccgaagcattaaaaattgatcagggcgcggtgttcaccgctacagccttggcgtctgcggccggctgtattttaatggggctcattgcaaagtatccgatcgcgattgcgccgggtatgggattaaatgcgttttttgctttctctgtcgtactcggcatggggatttcatggcaggctgcgctttccggcgtcttgatttccggaattatcttcgtggcgctttcgctgacgggactgcgggaaaaaatcattaatgcgattccgcctgagctgaaattggcggtcggcgcgggtatcggtttgtttatcacatttgtcggtttgcagggttcgggcattattgaagcgaactcatcgactttggtgtctatcggcaatattcacagcggccctgtgctgctgacggttttcggtgttattgtgacggtcattctgatggtgcttcgcgtaaacggcggcgtatttatcggaatgcttctgacggcggttgccggcatggtctgcggactgattccggttccgacgcacattgtcggcagcgtgccgagtcttgcgccgactttcggacaggcgtggatgcatcttccggatatcttctccgtccaaatgctgattgtcattttaacgttcctgttcgtcgggtttttcgatacggccggaacgctggtggctgtagcgacacaggccgggctgatgaaggaaaacaaacttccgcgtgcgggaagagcgcttctggcggattcaacatcaatcgttatcggagccgtactcggtacgtccacaacgacttcttatgttgaatccagctcaggcgttgcggcgggggcgcgctccggcttcgcggctgttgtgacgggcattctctttttgctggcgatgtttttctcgccgcttctgtcagttgtcaccacgaatgtgacggctccggctttaattattgtcggcgcgctgatggtggcgccgctcgggaagatcgcctgggataaattcgaggtggctgtgccggcattcttaacgatgattatgatgccgctgacgtacagcattgcgacggggattgcgatcggttttatattctacccgattacaatgatctgcaaaggaaaaggaaaaagcgttcacccgattatgtacgggctgttcgtcatctttatcctgtatttcatcttcttgaaataacggaaaaaccggctgagttaagccggttttttgtttttgtcctattccgtaaaaccaatacatactataaaacgtcatgtgggtgtccgggtgaagaaaaccgcttgactgtttaaggacgcttcggtaccttatataagtgttttattttcttgtttaacaaattccgccgtatttttttgataggagttgctgacatgacggaagaaagaaaagaaacgttggaagaagaaaaacagcatcaggggactgatgaagaaccgctgtcgagaatgtccagaaatgcgggacgttatcaaaagcaaaagaaaaaagataaggaacggcgcccggctccggcttttacggaaaaactcgcttctgcatgggccgcggtcaaacgctattgccgtttcgcgctgcgcattttgacatcaccggtgaaggtcgttggggaagacggcttttcccgctttaaatatgctcttatttcaatgcttgtattcagtatctttttctcaatcggaaattggtttcagctgagggcaagccagcaaaggcctctcggatacggggagcggcatcatacgttttttgacggctttaccgtcgttctcgtgtatacgctcgtcttttttgccgctgcggccggcgcggtctggcttgtatcacgctatatgatgaaacagaaaatcacgatgcgggatgcggccgcgggggtcggatcgcttttggttccggctgtcgccagctctatcgtgtggatgattttcgcgatattgaatctgccggtcatcaccgtggtgtttacggcgctgaccttgtttctggccgcctcggcgatggtgcagtttgtgcagattctttacaaatcggctgaaaagcctgcggctgacgtgatgtactgtatttccgcggcggtcatcatcatgctcatttttacggctgtgacatggccgctcatttcagagtactttactgcttcgctgatccctttataagtcgaaatttgtctttcacaatgtttacaaatttttctaataaagcgtgttgttttgaagacccggccgagatatgatgagagcaacagcaattcgaaagcggcactactctttatgattcggaaagggatgatgaagatggccccgttgttgcgagaagccattaatcggaaaaaacagcatctgaggacaaagctgatccgctcagggttttaccaaaaccatgttcaggaactgtccggatacacgctgagtgagcttgagaaggaatatgaagccgtcaaacgattgaaaaaagccgagcttcactgataagagcttgaaagtctgccttgcggggcgggcttttttttcttttgaaaatgatcaaaagagggtaaactatccttaattgaaagattggcttttcaaattatcagaggagggggaatcaatgatgcagacgattttatccaacagtataggtatggttctcattattctcatcattaacattatatatgtctctttctttacgatcaggatgattctgacattaaagggacagcgctatttcgccgcgggcatcagtacgattgaaatccttgtgtatgtgaccggcctgagtctcgtgctcggcaatctgaatcaaattcaaaacgtcattgcctatgcactcggctacggcctcggcgtcatagtgggaatgaaaattgaagaaaaactggcgctcggctatattacagtcaacgtcattacgaaggagctcgatctggacctgccgaaacagctccgggaaaaaggatacggggttacaagctgggttgcgggcggacttgaaggagaccggaccgccatgcagatactgacaccgcgcaaatatgagcttcagctttatgatacgattaaaacgcttgatgaaaaagcgtttatgatcgcctttgagccgaaaacgatccatggcggattctgggtgaaagcagtgaagaagaggagaattaaggaatgacaaagccaaaaaagaaacggtttgaagtaacggaacatgaaacgattgacaccattctcactttaatgaaggaagagggctatatgcccgtccggcggatggaagagccgatctttacagaaaagaaagaaaatggatcaattcaagtcgttccttgcgggaaaaaaatcgtatttgaagggaaattgatctaaacacgaacattaaaagaaagaatttttatatcgttcgataatgtcgttgacattatccaagtccgttgttaagataaacatgaaatcaaaacacgacctcatataatcttgggaatatggcccataagtttctacccggctgccgtaaacggccggactatgcaggaaagtgataaacagctgacatggatatcgcagaagcgaacgactgacgatacgcgcgccatgcccggtttgtattgcttcctcatagttgcaatataagccgggcttttttttctgaaaaacaaagcatgagaaggtgggaacagaatgcagccgctagcaggaatcatcatgggaagcacctccgattgggagacaatgaaacatgcatgcgacatacttgacgaacttcacattccttatgaaaaacaggtggtatccgcgcaccggacgcctgatttgatgtttgaatatgcagaaagcgccagagacaggggtttaaaagtcattattgccggagccggaggagcggcgcatctgccgggaatgacggcggccaaaacgacgctgccggtgatcggcgtaccggttcagacaaaatcgcttaacgggcttgattctcttctgtctatcgtacagatgcccggcggcgtgccggtcgcgacgacggcgatcgggaaagcgggcgcagtgaacgcgggtctgttagccgcgcaaattttgtcggcatttgacgatgacattgcggataaactagaggcgagaagaaatgcgacaaaacaaacggtgctggaaagcagtgatcagcttgtctgataaaaaaactatttaccccggcgccgtcatcggcattatcggaggcggacagctcggaaaaatgatggctgtcgccgcaaaacagatgggctataaagtcgctgtcgtcgatcccgtgaaagactcgccatgcggacagatcgccgatattgagattaccgcccagtacaatgaccgtgaagcgattcataaattggccggagtcagtgacatcattacctacgaatttgaaaatatcgattacgaggcgcttaactggctcaaagaacatgcatatcttccccagggaagtgagctgctgctcatcacccaaaacagggaaacggaaaaaaaggcgatccagtcagcaggctgtcaagtcgcgccgtatcgtatcgtaaacagcggacgggagcttgaggaagccgttcaggcactggggctcccggcggtgctgaaaacatgccgcggcggatatgacggcaaaggccaatttgtcattaaggaagaaggacagacagatgaagcggctgcgctgttagaaaacggcacgtgcatacttgaaagctgggtatcgttccggatggagctttccgttatcgtgacgagatcggtgcacggtgagatttcaacctttccggctgctgaaaatatccacaaaaataatattctgttccaaagcatcgtacccgcgagagcggaggaaacggttcaaaagcgggcagaggcgcttgccgttcagctcgcggagaaattggaacttgtcgggccccttgcggtggaaatgttcgtcacggaagacggagaccttttgattaatgaactggctccgcgtcctcacaattcagggcattatacgctcgacctttgtgaaacgagccaattcgaacagcatatcagagcggtctgcggacttcctctcggcagaaccgatcttctcaaaccgggaatgatggtgaatctgctcggtgatgaagtgaagcttgcggaggagcatacggagcttttaaaggaagccaaactgtacctgtacggaaaacatgagattaaaaaaggccgcaaaatggggcatatgacatttttgcggaagcctgatgaaacatggattcaggacatcacgaacatatggatgaaaagagacggaggacgagcataatgatcgaacgttattcaagacctgaaatgtccgcgatctggacggacgaaaacagataccaggcatggctggaagtcgagattttagcctgtgaagcctgggctgagcttggcgtcattccgaaagaagacgtcaaagtcatgcgcgaaaacgcgtctttcgacatcaaccgcattttggaaatcgagcaggatacgcgccatgacgtcgttgcattcacccgcgcggtttcagaatcattaggcgaagaaagaaaatgggttcactacggcctgacgtcaacagatgtcgtggataccgctctttcctatctattaaaacaggcgaatgagatcttgctcaaggacattgagagatttgttgacattataaaagaaaaagcgaaagaacataaatacacggtcatgatgggccgcacgcacggcgtacacgcggaaccgacgacattcggcctgaaactcgcgctttggcacgaagaaatgaaacgcaaccttgaacgtttcaagcaggcaaaagaagggatcgaagtcgggaagctttccggcgcggtcggcacatatgcaaatattgatccgttcgtagaacagtatgtctgtgaaaaactcggcctgaaagcggcgccgatttccactcagacattacagcgcgaccgacatgcggattacatggcggcactggctttgatcgcgacgagcattgaaaaattcgcagtggaaatccgcggtctgcaaaagagtgaaacacgtgaagtggaagagttttttgcaaaaggacaaaaaggctcatcggctatgcctcataaacgcaatccgatcgggtcggaaaatatgacgggcatggcgcgcgtgatccgcgggtacatgctgacggcatacgaaaatgtaccgttatggcatgagcgtgatatttctcattcatcagctgagcgcatcattcttcctgacgcgacaatcgcgctgaattacatgctgaaccgattcagcaatatcgtcaaaaacttaacggtattcccggaaaatatgaaacgcaacatggaccgcacactcggtttgatctattctcagcgcgtgctgcttgctttaatcgacacgggtctgcctcgtgaagaagcatatgacacggttcagccgaaagcgatggaagcatgggaaaaacaagtgccgttccgccagcttgtcgaagcggaggaaaaaatcacgtcccgtctcacaccggaacagattgccgattgctttgactacaattatcatttgaaaaacgtcgacttgatctttgagcgtttaggtttatagaagaagccagccggaggcggcttcttcagctgccatagattgaatattcccaacattcgggttaggaggccttccgtgaatattgtgaacaataatcttctttatgaaggaaaagcgaaacggatttatcaaactgaagacgaacagattctccgcgtggtctacaaggattccgcaacagcctttaacggtgagaaaaaagcggagatcagcggaaagggccgtctgaacaatgaaatttcaagcctgattttcaaacatctgcacgccaaaggaattgacaaccactttgtggagcgtgtttcagaatcagagcagcttatcaaaaaagtgagcatcattccgcttgaagtcgtggtcagaaacattgccgccggaagcatgtcgaaacgtctcggcatcccggaaggaactgagcttccgcagccgattatcgaattttactacaaggatgacgcgctgggtgatccgctcatcacagaagatcatatctggctcttgaaagcagcggctcctgagcaggtggaaacgatcaaatcgattacaaaacaggtgaatcaagagctgcagcatatttttgaagactgcggcgtcagattaatagattttaagctggaattcggcttagacgcagagggacgggttcttttagcggatgaaatttctcctgacacgtgccgtctgtgggacaaagacacaaacgaaaagctcgataaagatttgttcagacggaacctgggaagcttaaccgacgcatatgaagagattttcaaaagactgggaggcatttcataatgtataaagtgaaagtttatgtcagcttaaaagaaagtgtgctcgatcctcaaggaagcgcggtgcagcatgcattgcacagtatgacctacaatgaagtgcaggatgtgcgcatcggaaaatacatggagctgacgattgaaaaatctgaccgcgatcttgacgcgctcgtgaaagaaatgtgtgaaaagcttcttgccaatacagtcattgaagactaccgatatgaagttgaggaggttgtcgcacagtgaaatttgcggtgattgtgttacccggctccaactgtgatattgatatgttccacgccgtaaaagacgaactcggcgaagaagtcgagtatgtctggcacgaggaaacaagccttgacggatttgacggcgtgctcatccccggcgggttttcatacggcgactacttgagatgcggcgccatcgccagattcgcaaacatcatgccggctgtgaaaaaagcggctgccgaaggaaaaccggttctcggcgtctgcaacggattccagattctgcaggagctcggacttctgcccggcgcgatgagacgcaacaaagatttaaagttcatctgccgaccggttgaattaatcgtgcagaacggcggcacgttattcacatcttcctatgaaaaaggacaatcgattacgattccggttgcccacggcgaaggcaatttctactgtgatgacgaaacgcttgaaagattaaaagaaaacaatcaaatcgccttcacatacggcggcgatattaacggaagcgtcagcggcattgccggcgtcgtgaatgagaaaggcaacgtattaggcatgatgcctcaccctgagcgcgcagtcgatgaactgctcggcagcgcagacggtcttacattgttccggtctatcgtgaaaaattggagggaaactcatgtcgctactgcttgaaccaagtaaagaacaaataaaagaagagaaactctatcagcaaatgggtgtcagtgatgacgagttcgcactcattgaatctattatcggaagattgccgaactacacggaaatcgggattttttccgtcatgtggtcagagcactgcagctataaaaactcaaaaccggttttacgtaaattcccgactagcggcgaacgcgtgctgcagggtcccggagaaggcgcgggaatcgttgacatcggtgacaatcaggcggtcgtgttcaaaattgaatctcataaccatccgtcagcgattgagccataccaaggtgctgcgacgggagtgggcggcatcatccgtgacgttttctcaatgggcgcccgtccgatagctgtattaaactctcttcgatttggtgagctcacttcacctcgtgtgaagtacttgtttgaagaagtagtggcgggaatcgcgggatacggaaactgtatcggaattccgacggtcggcggagaagtgcagtttgacgcaagctatgagggcaacccgcttgtcaatgcaatgtgcgtcggcttaattgatcataaagatattaaaaaaggccaggcgaaaggtgtcggcaacacggtcatgtacgtcggcgctaaaacgggccgcgacggcatacacggcgctactttcgcatcggaagaaatgtcagattcatctgaagaaaaacgttccgcggtgcaggtcggcgatcctttcatggaaaaacttctcctggaagcatgccttgaagtcatccaatgcgacgccttagtcggcattcaggatatgggggcggccggtctgacaagttcgagtgctgaaatggcaagcaaagccggctcaggcattgaaatgaaccttgatctcattccgcagcgggaaacaggtatgaccgcttacgaaatgatgctttctgagtctcaggaacgcatgcttctcgtcattgaacgcggacgtgaacaggaaattgtcgatatttttgataaatatgatcttgaagcggtttccgtaggtcatgttacggatgataaaatgctccgcctccgccataacggagaggttgtttgcgagcttccggtcgacgcgctggcggaagaagcacctgtataccacaagccgtcagcagaacccgcgtactaccgcgagtttcaggaaacggaagttcccgcgcctgaagtaaaagatgcgacagagacgctttttgccctgctgcagcagccgacaatcgccagcaaagagtgggtgtacgatcaatatgactacatggtgcgcacaaatacggtggtcgctccgggctctgacgcgggagtgctcagaatccgcggcacgaaaaaagcgctggcgatgacgacggattgtaacgcccgttatttatatcttgatccagaagaaggcggaaaaatcgccgttgccgaagcggcgcgcaacatcgtatgctccggcgccgaaccgcttgcggtcacggataatctgaatttcggaaacccggaaaaacctgaaattttctggcagatcgaaaaagcggccgacggcatcagcgaggcgtgcaatgttctcagcacacccgtcatcggcggaaacgtatcactttataatgaatcgaacggaacggcgatctacccgacgcctgttatcggcatggtcggcttaattgaagataccgctcatattacgacacagcatttcaaacaagcgggggatcttgtatacgtgatcggcgaaacaaaacctgagtttgccggaagcgaactgcaaaaaatgacagaaggccgcatttacggcaaagcgccgcaaatcgatcttgatatagagctgtcacgccaaaaagcattgcttgacgcgattaaaaaaggcttcgttcaatccgcgcatgacgtatcagaaggcggcttaggcgtagcgattgcagaaagcgtcatgacgacggaaaaccttggcgccaacgtgactgtagcaggagaagcggcattattattctctgaatctcaatcccgcttcgtcgtttcagtgaaaaaagaacaccaagaggcgtttgaagcggctgcggctgatgcggttcatatcggcgaggtaacggctgacggacttctggcgattcaaaaccaggacggacaacaattggttcacgcgcaaacgaaagaacttgagcgcgcgtggaaaggagctattccatgcttgctgaaatcaaaggcctgaatgaagaatgcggtgtgtttggcatctggggacatgaagaagctccgcagatcacatattacggcctgcacagcctccagcacagaggacaggaaggcgcgggaattgtcgcaactgacggtgaaaaactgacggcgcataaaggacaggggcttattaccgaggtttttcaaaacggcgaactgagcaaagtgaagggaaaaggcgcgatcgggcacgtccgttatgcgacggcaggcggaggcggatatgaaaatgtccagccgctcctgttccgttcgcaaaacaacggcagcctcgcgctcgcccataacggcaacttggtcaacgccacacagttgaagcagcagcttgaaaaccaagggagcatctttcagacttcctccgatacggaagtgctggctcatctgattaaacgcagcggacacttttcgctgaaggatcaaatcaaaaattcgctatctatgctgaaaggcgcttatgcctttttaatcatgactgaaacagaaatgatcgtagcgcttgacccgaacggactcagaccgctgtcaatcggcatgatgggcgatgcttacgtcgtcgcatcagaaacgtgcgcattcgatgtggtcggcgcgacataccttcgcgaggtagagccgggcgaaatgctgatcatcaatgatgaaggcatgaaatcagagcgtttctccatgaatatcaaccgttccatctgcagcatggagtacatttatttctcaagacctgacagcaatatcgacggcattaacgtgcacagcgcccggaaaaacctcgggaaaatgcttgcccaggagtccgcggttgaagcggatgtcgtcacaggcgtacctgattccagtatttctgcagccatcggctatgccgaggcaacgggcatcccgtacgaactcggtctcattaaaaaccgttatgtcggcagaacgtttatccagccgtcacaggctctccgtgagcaaggcgtgagaatgaagctgtccgccgtccgcggtgttgtcgaaggaaaacgggtcgtcatggttgatgattccatcgtgcgcgggacgacaagccgccggattgtcacaatgctcagagaagcgggagcgacagaggtgcacgtcaagatcagttcaccgccgatcgctcatccgtgcttctacggcatcgacacatcaacccatgaggagctgatcgcttcttctcattccgtggaagaaatccgccagatcatcggtgctgacacgctttctttcttaagtgtagacggattgttaaaaggagtcggccgaaaatttgaagacaccaattgcggacaatgcctcgcttgttttacgggcaaatatccgacggaaatttatcaggatacagtgcttcctcacgtaaaagaagcggtgctgacaaaataaaatgtgaaaatgacataaaggcagcgggaattcaggctgcctttctctttctgccttttaaggagaaacgaattgacaaggagtgatagggatgtctgatgcttataaaaatgccggagttgacatcgaagccggatacgaagccgtcaaacgaatgaaaaaacacgtggagcgcacgaaaaggctcggcgttatgggaagcctgggcggttttggcggaatgtttgatctgtcagagcttccgtatcaaaagcctgttttaatttccggaacagacggtgtcggcaccaagctgaaactcgcattttcaatggataagcatgacacgatcggcgtcgatgcggtcgcgatgtgtgtaaacgatgtgcttgcccaaggagcggagccgctgtttttccttgattatttggcggtcggcaaggctgatccggtaaaaattgagcagatcgttcagggcgtggcggacggatgcgagcagtcaggatcagcgcttatcggcggtgagacggcggaaatgccggggctgtatacggctgatgaatacgatattgcgggcttttcagtcggcgtcgcggaaaaagacgaaatcgtcaccggtgaacatattgaagaggggcatctcttaatcggacttacttcaagcggccttcacagcaacggattttccctagtgagaaaagtgcttcttgatgacggcggacttgatttggatactgtctatgaaccgtttgcgcgtcctctcggagaagaattgctggaaccgacgagaatatatgtgaagccggtgctcaaggcggtgaaaagcggtaaggtagacggcatggcgcatgtgacaggcggaggattcatcgagaacatcccgcggatgctgccggacggattgagcgcggaaattgatcacggatcatggccgatcccgccgatttttccgtttctgcaggagcacggcaagctgaaagaagaagaaatgttcaatgtctttaatatgggcatcggttttgtccttgccgttaaagaagaggacttgacagacgttatcgacacgcttgaagctcagggcgagaaggcttatctgatcggccgggtcaagcggggcgaaggcatttctttcggcggtgcggctctttcatgaaaaagtttgcggtatttgcttcaggaaacggatcgaacttcgaggccattgccaaacgcatgagagaagagaagtgggatgcggagctctcgcttctcgtgacggataagcctcaggcaaaggcggtggaaagggcggaggctttacacattccgtcattcgcctttgaaccgtcatcttttgaaaacaaagcggcctttgaacgggccgttattgaacagctgcgcctgcacggggcggaattaatcgttctcgccggctatatgagactgattggagatacgctgcttgaagcatacgggggccgcattattaatatacatccctcgcttcttccggcattccccgggattgacgctgtcggacaggcgtatcgggccggtgtgaaagtggcgggcattaccgttcattacgtcgacgaaggcatggacaccggaccgattatcgcgcaaaaagcattcgaaatacaggaaaacgatacgcttgaagacatagagcatacaatacacgagcttgagcacaaatggtatccgagcgttgtgaaacagctgctgggactaaataacagaggtgaaaaggcatgacaatcaaacgcgcactaatcagtgtttctgataaaacaaatctcgtacctttcgtaaaggaactgacagagctcggcgtcgaagtcatttcgaccggaggaacaaaaaaacttcttcaggaaaacggtgtggatgtcatcggcatttcagaagtgaccggatttcctgaaattatggacggacggttaaaaacgctccatcctaatattcacggcggactgcttgccgtaagagacaatgaagagcatatggcgcagatcaatgagcatggcattgcccccattgaccttgtggtcgtcaacctttacccgtttaaagaaacgatttcgaaagaagacgtaacatacgatgaagcgatagaaaacattgatatcggcggtcccggcatgctgcgcgccgcatcgaaaaaccatcaggatgtgacggtcatcacagatccggccgattacagctccgtgctcaatgagattaaagaacacggcggcgtttcgcttaaaagaaaacgcgagcttgcggccaaagtattccgccataccgcggcatacgacgcattaatcgctgattacttaacacgcgaggccggtgagaaagaccctgagcaattcaccgttacatttgagaaaaaacaatcgctccgctatggtgaaaaccctcaccaagaggctgttttctatcaaagcgcacttcccgtctccggttccatcgcggcggcaaaacagcttcacggcaaagagctttcttacaacaatattaaggacgcagatgcggccgttcaaatcgtccgggaatttacagaacccgcagctgttgccgttaaacatatgaacccgtgcggagtcggtacgggagcttcaattgaggaagcattcaataaagcgtatgaagctgataaaacctccattttcggcggcatcatcgcgctgaaccgtgaagttgatcaggcaacggctgaagcccttcacggcatctttttagaaatcattatcgccccttctttcagtgaagaagcgctgaacgtactgacggcgaagaaaaaccttcgtctgctcacgcttgacgtgtccgcatcagggaagaaagaaaaacagctgacatccgtacagggcggccttttgattcaagatttagacgtccatggatttgatgacgccgacatcagcatcccgacaaaaagagagccgagcgagcaggaatgggaggatttgaagctggcctggaaagtcgtcaaacatgtgaaatccaacgcgatcgttcttgcaaaagaccatatgacggtcggtgtgggagcggggcagatgaatcgcgtcggttcagctaaaatcgccattgagcaggccggagaaaaagcaaagggcagcgcgctcggatcagacgcgtttttcccgatgccggatacagtcgaagaagccgcaaaagccggtgtcacggcgattatccagccaggcggatcggtccgtgatgaagattcgattaaaaaagcggatgaatacggcatcgccatggtattcaccggcatcagacatttcaaacattaagagggggaacgaagcgtgaatgtattgattatcggaaaaggcggcagagagcatacattggcttggaaagcggcgcaaagcccgcttgttgacacggtgtacgccgcgcccggaaatgacggtatggcagactgcgcgacgctggtcaacattgaagaaagcgatcatgctgcactcattgcgtttgcgaaagaacatcatgtcggcctgacgattatcggccccgaagttcctctgattgaagggatagccgacgagtttgaaaaagccggactgcttgttttcggaccgtctgaaaaagcggcaatcattgaagggagcaaacagtttgccaaggatttaatgaaaaaatacagcattccgacggcggagtatgagacgtttacttcatttgaagaggcgaaagcatatgtgcagcaaaaaggcgcgccgattgtcattaaagcggacgggcttgccgccggaaaaggtgtcacggtcgcgatgacggaagaagaagcgattgaatgcctgcacgattttcttgaggatgagaaattcggggaggcgagcgcatctgttgtcattgaagagttcctcgccggcgaagaattttctttaatggcgtttgtaaaaggggagaccgtctatccgatggtaatcgctcaagatcataaacgcgccttcgatggagacaaagggccgaatacgggcggaatgggagcctactcaccagtgccgcacatttccgatgatatcgtcagaagcgcagtcgaaacgattgtgaagccggcggcaaaagcaatggtcaaagaggggcgttccttcacgggcgtgctgtacgcggggctgattctgacggaaaacggatcaaaagtcattgaattcaacgcgcgtttcggagatccggaaacacaggtcgtcgtgccgagaatggaatctgacctcattcaggtgctcttagatcttctgcatgagaaggatgttgacctaaggtggaaggatacggccgccgtcagcgttgtgctggcttctgaaggctatccggaaggctatgcgaaaggcactccgatcggcagtttgacgtccgctgaagacgggatcgccgtttttcatgccggaacgaaaaaagacggcggacaatttgttacaaacggcggccgggtcgccaatgtcacggcatttgctgagacatttgaagcggcgagagataaagtgtacagcgccgtttcagggctgacaaaacccagactgttttacagaagcgacatcggcgcccgtgcgctgaaagcatcgcagcgatgaagaggaaaaccccgcgttatgtaagatgcggggttttttacgtaagctgaggacgacctagactgtcggcttgccgtgtgacacgcagtcatcgatgaagtcctccggcgtatagacggattcttctcagactcgcgggacaggagaaattaaataacaagccgaaacggcttgttatttttcttgctgatggctgtcatcctgattcattccagcttggaacatatatgtcaccggacagaagcggaggatgccggatgccgctttcatcgcgcccatcatcatacagaagagatgcatcttgcaccaaggttttctcgtgtatttcgctgaagcagcagacaaaatggtgaggccgcaagtgatgcgcataacggcatttaataaactgatattcggtttcatcatttcagctcccttagaaaaagtttttcattcatcttcaataatttgtaacgttttagccgtgcgatatttgtgcggatgtgatacgatgggtctaatataagcgaaggagagtatgtgaatgtccgaacgtacctttaactggaaaaataaagacatcagatcacaggcggatgttgtagactcaaagctgcttccaacgctacttttacgggatgctctcgtattaaatccttttttaaaacaatggctgaaaaagaatgtctggatttatggagaccgaattgtatatgttggtcatgagcttcctgatgcagcagagcacattcataccataaattgtgaaggaaaatacattgtgccaggttacattgaaccgcatacacatccttttcaaatatataatccccaaacgctcgccgaatatgtgtctcaattcggaacaacgacgtttgttaatgataacttgttttttcttttgcacagcggtaaaaagaaagcgcttactatattagaggaactgaaaaaacagccggtgcaatacttctggtggtccagatatgatctgcagactgaagtgctgaatgaggatcagcttctttcttttgatgtccgcaagcaatggatggagcacccggatgtcattcaaggcggagaattgaccggatggccgcgcctcatggacggcgatgacttgatgcttcattgcatgcaggcgacaaagaaactgcgcaagcggatagaagggcattttcccggagcctctgaaaaaacactgacgaagatgaaactgttcggagcggattccgaccacgaggcgatgaatggcggcgaggtgatgagacggcttgaattgggctactatgtttcgctcagacattcatccatccgccctgatttgagaacgattttgcaggatctccatcaaaaaggcttccggcattatgatcatttcttctacacgacggatggagcgacgccgcttttttataaaggcggcatgacgaatgaattaatcaaaatcgctttggaggaaggagttccggcgatcgatgcctacaatatggcctcctttaatatcgcgaagtattatcagatggacgactttctcggtgtggtcggtccgggacggcttgcttcattgaacattctcgatgacccgatgaatccggacccggtcacggtgatctccaaaggcatcctgctgagggaagacggccgaaatatgaatgcgtttacagaaacggattggaaaaagggcggtcttgtccctcttgagctttcatatgatatgacgatggatgatttacagttttcaatgccgatgggtgtgaccatgcgcaacgcggtcattatggagccgtatatgattgcgattgataattctgttgaccagctttcttttgatcatgatgaatgctatctcacgcttctcgataagcatggaaaatggcgggtcaatacaatgctgaaaggttttgccgatcgggtgcagggctttgtcagttcctacacgacaaccggagatattatcgctgccggaaaaaataaagaagatatcctgctcgctttctcacggatgaaagaaatcggcggcggaatcgtgcttgccgaaaacgggaagattcttcatgagattcccctcgccttaaacggttctgcatccgcggagaagtatgaagaagtgcttgagaaagagcaaaaactgaggatgttgctggaggagcggggctaccgattctgcgatccgatctatacgctgctctttttgcagagcacacacctgccttatatccgcattacgccgagaggaatattcgacgtgatgaaaaaaactgtactctttccatcgataatgcgttaaaatataaaagcagggagccgacatatgaaaagatggaaaaccgtttgtatgctttgttttgcgtttttgctgcttgccgcctgccggcagaacaatgccgatcaggtgcagccgaaagaagcggaagctcctttaacggggctgaaaactgagcagaagcttgcagaacgccgtccgattgcagtcgcagtgaacaatcatccgaaggcgaggccccaatccgggctgtcaaaggcggatgttgtcatcgaagcgctcgcggagggccggattacgcggtttctcgcgatttttcaaagtgagatgccggaaacggtcgggcctgtgcggagcgcgagggaatattttgtcacgctcagcagcgggtttaacagcatatttgtccatcatggctggagtcccggcgcaaaaaagcagctggagtccggagcttacgattatataaacggtttggattttgacggaagcctgttttggagagccgatttcagcaagccgccccacaattcctacacgtcgtatgacaatatcaggaaggcggcggaacaaaaaggatacaagctgaacggaaaaacagaaccgctcccatttcagacatcagatgcaaaaccaggaaatgaaacctacaatattcggatagattatggaacacaaaacattacaaatcttgtcgaatacgattatgataaaaaagctgatgcttatacaagaagctctgatggtgtgaaagcgacagaccgggagaccggaaagcctttagccatgcacaacatttttattgttgaagccggccatcgcatgacagacaaagatggaaggcgggccatcgatattcagtcaggggggaagggcctcctgcttcagcacggcgatgttatagagtcagactgggaatataaagacggccgtattctgcccgtaaaaggcggtgagattcttccgtttgtgccaggaaagacatggattaatatcgtgcctgatctcgatgcagcttccattagtaaaggagaaggtgtttgacgatgcaaatcgataaattacgcggaaaagaactggaccagttatttttatctattttatcgctgaaagatctggaggaatgctatcgtttctttgacgatctttgtacgattaatgaaatccaatcgctggcgcagcgtttggaagtggcaagaatgctccgcgaaggaaatacgtatcacaaaatagaaagcgaaacgggtgcttccacagcgacgatttcccgggtgaagcgctgcttaaattatggtaacgacgcctatgaaatggcgcttgaccgcgtaaacaaaggagaatcctcctcagctacgtaaaaaaccgctctgccgatgacggcaggcggttttttttatgcgtgctgattcaaaaggccgggaagttccctcaggcttccgtcttcctcccggtatacgatgtgttcagctgaaaaatgaatcggcgagctgatgcccgccgcagcggcaaggtgaaacagcccttcacgcaatgagagcacgtagttgcagacgcggtgctgtttatcctcgatactgagcgcgcgctgaagttttgggtcggttgtcgccactccgacaggacaatgattggtgtggcatacttgagcgcggatacagccgactgaaaacatcattccccgggcaatattgacaaaatccgcgcctaacgcgagggcaacggcaatcttatccggagtgagcagctttccggatgcgaaaattttcagcttatctcttatcccgtatgtcttcaaaaggccgtcaacaaggggaaggccggtcagaatcggcaggccgacggaatccgccagctcatggaaagaagctcccgttcccccttcactgccgtcaatcgtaataaagtcgggaagtttgcctgatgaactcatacaggaaataaggtcttcaaggtctttgcggctgcccgggacaattttgataccgaccggtttttcgccgacagtccttaatttctcaatgaaatcaagcatgtccggaacatttgagaactcgttgaagcggtttgggctgtcaatggattgtccgggctgcacatttctgatggcggcaatttcttcggtcacctttgaaccgtcaatatgcccgcctcttgctttcgccccttgcgcaagctttaattcaaaggctttaatctgctcgaggcggctttttttcttaaattcttcccacgaaaattctccatcttcggtgcggacgccgaacaggccggggccgatttggcagataatatccgcgccgcctttcaggtgatactcagacaggccgccttcgcctgtattcatccatgtgccgccggcctggtgcagcccttttgacagggcggtgattgccctgtcgccaagtgagccgtagctcatcgctgattgtccgattaaccctttcacataaaacggctttttgcatgtgtcgcggccgatcacttgcacatcgtccggatgcaggtaataagggtccgcttttgctttttcgcggtgttcgctgcgtttcagcaggttgtctttgtcaatcttgtataccatcgtgtcgatcttcggcgtctgatctgcgcgcagctcctccctttgtttcgggaagagggcgttacggatataatagcccggctgattgaaatcccgttctgagccgaagcccatcattctgcttttatactttcccgacatgaccgtctgttcatattctctccgggaaaacggctgttcttcgttatcattgctgaataaatactgccgcagctcaggtccgattttttcaaatatatagcgcagttttcccgctacgggataattgcgcagcactgaatgttcttcctgcttttcgtctcttatgtatatccagagaaacagtgcggcgggaactaaaataataaaaatcaatatacaaatcagtacgataatggcttgttccattgagatcagactccttgtcttttttctctttgacattccacatattgtctgttttcaaacatagccgtttcccgtccggcggagcgcaatctttttttgtgaatcaggtgaatgacgtctttttccgtttttccgggccaaacgaatttgttataatgtttaaatggcaagaaacgaatggaggaacgaaaacgcatgtacgatgttaacgagtggaagcatgtttttaaactcgatccgaataaagatttaccggatgaacaactggaacagctttgtgaatcagggactgacgccattgtgatcggaggaagcgacaatatcaccgaggacaatgtgctgagactgatgtcaaaggtgcggcggtttttagtgccgtgcgtacttgaggtgtcgacgattgattccattgtgcccgggtttgatctttatttcattccgagtgtgctcaacagcaaaaaggcggactggattgtcggcatgcatcatcaggcgatgaaagaatacggagagctcatgtcaatggaggaaatcgtgacggagggctactgcattgtcaaccctgattgtaaggcggccgctttgacggaggcggatacacatatagaaacagaagatattctcgcctatgcgcgggttgcggaacatttgcttcatctcccgattttttatctggaatacagcgggatgctggcggacatagaaacggtggagaaaacgaaggctgtgctggacaagtccgtcctgttttacggaggcggcattaaagacgcggaaacggcggaacggttcggccgtcatgccgatgtcatcgttgtcggaaatgccgtatatgaagattttgatcaggcgcttaaaacggtggcggccgtaaagacaaagtagtcaagcggacgaaattgatttatgatagaacatatgtttgataggcggtgaacggatatgaattacattagcaatcaattattaagcggattaaatcccgttcagcaggaagcggtcaagacgacggacggtccgctgcttctgatggcgggcgcgggaagcggaaaaacacgtgtgctgacgcacagaatcgcatacttaatggcggaaaaacacgtggcgccatggaacattctggcgattacatttacaaataaagccgccagagaaatgaaggagcgggtggagagcattctcggacccggcgcggatgaaatctggatttccaccttccacagcatgtgcgtgcggattctgcgcagggatattgacagaatcggcatcaaccgaaatttctccattcttgatacggctgatcagctttccgttattaaagggattctgaaagagcggaatatcgatccgaaaaagtttgatccgagaagtattttaggctccatcagcagcgcaaaaaacgagctgatcgaacctgaggaattcgcaaaaacggccggcggctactacgatcaggtcacgagtgacgtgtataccgattatcagaaaaaactgctgaaaaaccaatcgctcgattttgatgatttaatcatgacgacgattaagcttttcgagcgtgtgccggaagtgcttgagttttatcagcgcaaattccagtacattcacgtagacgagtatcaggatacgaacagggcgcaatacctgcttgtgaagcagcttgcggcccgtcttgaaaatatctgcgtcgtcggtgactccgaccagtccatttacagatggcgcggggcggatatcgcgaatatcctttcctttgaaaaagattatccgagcgcaaacgtgattttgctcgagcaaaattaccgctcaacaaagcgtattctgcaagcggctaacgaagtgatcaaaaacaactcaaaccgcaagccgaaaaacctgtggacggaaaatgacgaaggcatcaagctttcttattacagcggcgacaatgaattcggcgaaggccaattcgtcgcgggcaaaatttatgagctgcacagctcgggccggcggaagctttccgatatcgcgattttataccggacaaacgcccagtcgcgcgtcattgaggaaacccttttaaaatccggactgaattacaatatcgtcggcggaaccaagttctacgacaggaaagaaattaaagacattctcgcatacctgcgccttgtgtcaaacccggacgacgacatcagttttacgcggatcgtcaatgtgccgaagcggggcgtcggcgcaacttcactagaaaaaatcgcttcatatgcggcgatgaacggaatgtcaatgttccaggcgatcaaacaggttgatttcatcggcgtcagcgcgaaagcggcaaacgcgcttgacggctttggcgcgatgattgaaaatctgacgaacatgcaggattacctgtccattacggaactcacggaagaaattctcgaaaaaacggaatacagagaaatgctgaaggccgaaaaatcaatcgaagcccaaagccgtcttgaaaatatcgacgagtttctttccgtgacgaaaaacttcgaacaaaaaagcgaagacaagtctctcgtcgcgtttctgactgatttggcgctgattgcggatattgaccagctcgaccagaaggaagaggaatcaggcggaaaggatgccgtcactttaatgacactgcacgccgctaaggggcttgaatttcctgtcgtgttcttaatgggcatggaagaaggcgtgttcccgcacagccgctccctgatggaagaagccgagatggaagaagaacgcaggctcgcatatgtaggcattacgagggcggaagaagaactgtatttaacgaatgccaaaatgcgcaccttattcggccgcaccaatatgaatccggaatcccgctttatcagggaaatacctggcgatttattggagaacctaaatgagaagaaaacacctcgcatgcagccgggaagaaaagtgcagccaaaacgcgggcccgtatcccgtcccgtttcctatgcgaacaaaacaggcggcgactcgctcagctgggcggtcggcgataaagcgggccataaaaaatggggcaccggaacggttgtcagcgtaaaaggagaaggcgaaagcaccgagcttgatatcgcattcccgagcccagtcggcgtgaagcgtctgcttgccgcttttgcgccgattgaaaagcagtaacctgaagaggaaaggaagaacatgatggacaaagaaacagcgaaacaccgggcagaagaattgcgccgcaccatcgatcagtacagttatgaatattacaccttagatgaaccgagcgtgccggattccgagtacgacagactgatgcaggagctgattgccatagaggaagagcacccggaactcagaacgcctgattcgcccacacagcgggtcgggggagcggtgcttgaatcgtttcaaaaggtgcagcatggcacgccgatgctcagtctcggcaacgcatttaacgatgatgacctccgcgattttgaccgccgcgtccgtcaggctgtcggtgacggcgtcgcttataatgtggagctgaaaatagacggtcttgctgtttctctccgttatgaagacggctatttcgtcagaggcgcgacaagaggagatggaacgacgggcgaagatatcacggaaaacttaaaaacgatccgcaacattccgttgaaaatgaaacggaatctttccatagaagtgcgcggagaggcgtacatgccgaaacagtcatttgaagcgctcaatgaagaacggctgaaacatgaagaggagccgttcgccaatccccggaacgcggctgcgggctcactcagacagctcgatccgaaaattgcggcgaaacgaaatcttgacatcttcgtctacagtatagcggagcttgacgagatgggtgtggaaacacagagtcagggcctggattttctggatgagctcggttttaaaacaaaccaggaacggaaaaaatgcgccacgatagatgaagtcattgaaatgatcgaagagctgcaggcgaagcgggccgatctcccgtatgaaattgacgggatcgtcatcaaagtcgactcgctcgaccagcaggaagagctcgggtatacggcaaaaagcccgcgctgggcgattgcttataaattcccggcggaagaggtcgtgacaaaactgctcgatatcgaactgaatgtcggaagaacgggcgtcattacgccgaccgccgttctggaaccggtaaaagtcgcgggaacgacggtctcaagagcatcccttcataacgaagatttaattaaagagaaggatatccgcattctcgataaagtggtcgtcaaaaaagcgggcgacatcatccctgaggtcgtcaatgtcttaatcgaacagcggaccggggaagaaaaagaattcaatatgccgaccagctgccctgagtgcgaaagcgaacttgtccgcattgaaggagaagtcgcgctgcgctgcatcaatccggaatgtccggcgcagatcagagaaggcctgattcactttgtctcacgcaacgcgatgaatattgacggactcggagaacgtgtcatcacacagcttttccgtgaacatctcgtccgtaatgtcgctgatttgtataagctgacgaaagagcaggtcatccggcttgagcggatgggggaaaaatcaactgacaatctgatcagctccatccaaaagtcgaaagagaattcgctggaacgcctgctgttcggtctcggcatccgttttatcggctcaaaagcggccaaaacactcgccatgcattttgaaagcctggaaaatctgaaacaagctacggaagaagagctgcttgcggtagatgaaatcggcgaaaagatggccgatgccgttatcacctatttccgcaaagaagaaatgcttgagctattgaatgaacttgaggaactcggtgtgaacacactctacaaaggcccgaaaaaagtaaaagcggaggacagcgactcttattttgccggcaaaaccatcgtgttaaccggaaagcttgaagagctgtccagaaatgaagccaaggcgcagattgaagcgctcggcggaaagctgacgggatctgtcagcaaaaaaacagacttgctgattgccggagaagcagccggaagcaagctgacaaaagcgcaggaattaaacattgaagtatggaatgaagcacagctattaggagagctaaagaaataagaggagtgttttctattgaaaaagatgttggcattggcggcgacggcaacggcggcagtactcatgctgtcggcctgttcgccgagtttcggggggaacaaagaggaagagatcacgcagaaaacggcaaagtcttctgaaaaagcgatcataccgaaatataatatctctgattcctactataaaatggtgcttccgtttaaggccggaaaagcgcgcggcctgaccgcggaccggctgaacacgaggctggacatcgatgaattcgagacgggtctgatgcggctcgctcaagacacgttcccgacggatgactatttgtatcaggaaggccagtatttagatgaggacacggtactcagctggcttgaccgcaaaaaagagggcagtgatctgaaaaaggcgaaaaaggcagatgccaattttcagaatctcggcttaaaccccgtgctgccaagctcgggatcggcaaaagagaaaaatgaaaacagcccgatttacttagcgtccatgcttgagcaggattacttagtaagaaaagataaaaattccattcagcttggcggtatcatgatcggtctcgctctcaattctgtatactattaccgtgaaaacacaggtgatccgcagcaggaagtggagctcagtgacaaaacgatccgcagccacggtgaagaaatcgcccaggaagtcgttaaccgccttcggaaaatggataacctgaaaaatgtgccgattaccgtcgccctttataaacaagcgccgaaaacatcaatcgtaccggggaattacattgcaaaaactgaagtcaaagccggctcatccaccatttcaaactgggatgatgtcaaagaaaagtacgtcttctatccggcggatacagacacggcaaagaaataccctgatgattccgaagtatttaaacgcttcaaaaacgccatcgacagctacttcccgaattacaccggagtcgtcggaacggcaatgtacgaaaacgatgaaatgagaaaaatgaagattgaaatcccgatgcaattttacgggaaaagcgaagtaatcgccttcacccaatacttaacaggtgagctgatggattattattcaaaaggctcagttgatgtcgaaattaacattacctcgtctgacgggcaggaagcgctgatcgtccgcaatgcgggtgacaaagaaccgaccgtccatatttacgattaaccaagatgcccttgttcatttctgtatgagcaagggttttttttattgtgatatcgttggagcgaggaaatgaggtatgttaagatatttgtataatcaggaattaacaggaaaacacatttcattctaagcggatgttactaatctgctgtgaaagaagaagggcaggaatgttgatgaatgacatttgctgagtacacacaccgcctacaaacgttatgaaaagggtgaatcagcatgcataaagatattaaagcgatttttgaggaagataaggtgctcgctgaagcaggtgaaatatacggctttaccaagtttcaatttattgcggacgccgagaactacgtatatgaaattgtgaaagataacgaaccttatattttaaaaattacgcatacgatcagaagaacaccggaatatattctcggagaaatggaatggcttcatcatctggcaaagggagggctttcagcagcaaagccgattccttcattaaatggcaaagatgtcgaagaagtgccggatggaaaaggcggagcgtttttagtaagagtctatgaaaaagcgcccggacgcaaagtggaggaatcagactggaacggaaccctgttttacgagcttggaaagtacacggggaacatgcaccggctgacgaaaagctaccgtctgagtgatccgttatataaaaggcaggaatgggatgaagaggagcagctgaagctgagaaaatacgtacccgcagatcagcatctcgtatttgagcgggcggatgctctaatggaaaaactgcgccgtttgccgaagaaccctgaaaactacggccttgtgcacgccgatctgcaccacggcaatttcaattgggacaacggaaaaatcactgcatttgattttgatgatatcggctacaattggtttgtgaatgatatcagtattctgctgtacaacatgttgtggtatccggtcatcccgtatgaagacaaggccgtgtttacgggtgaattcatgactcactttatgaaaggctacagggaagaaaatgaccttgaccccgcatggcttgaacacatcccggatttcctccggctgcgccatatgttgatctacggattattgcatcaggcgtttgacctcaattcactcggggacgaggaacttgagatgctgaaaaccttcaggcgcgatatcgaaaatgaaaccccgattacggagtataacttttctgcattcgtataaatagaaaaacgccggctgaatccagcccggcgttttttataacgtatcacacttcactccgacgacaccctgaatttctttaatatcataatagacgtcagtggtgtagcggtttttatgaacactgactttcacttccataatcggaaattctttttcgcccagatcatcaatccggacggagtgaatgcggagctgtttgcttttcatttcctttaaaatcttggtcattttgtctttatcggaaagagacattctcacgcggatatctttttccttcaagcggttgggaccgatttttctgatcagccacggaagaaattcgacgctgatcaggataaacaagaggcttgcgaacgcctctttataaaagccggcgcctgtagccagaccgagcccggctgcgccccagatgatggccgatgtcgtcaggccggatatgacgtcattgcttttacgcaggatcacgcccgcgccgataaaaccgacgccggaaatgatttgggcgggaaggcggagcggatccatcatgattcggtaatattttgggaaatgatatgccgcattaatgctgacgatcgtcagcatacaggagctgacggcgatgacgatacaggttttcagtccgagcggtttgtttttcagctcgcgttcaagaccgatgatcatgccgatcagcgtggcaatgcccagctttaataaaatctctggttcgataggccagctcaatttgcacagcacctccgcaatttttcttataataaattgatatgattttctcacagtatttatagcaggacaagtgcggaagaaaaaagccgtcagggataaaatctgacggctttttgtctatttcttgtttttcaaaagagcttccatccggctgaacagctgataagaagcatcggccggttttttggtcagcaggctgacggcaataccggcaatcagactgaggaagaaccccggaatgatttcgtatacgccggttgaagcggcaagccctgtcgtgatccagattaaaacggccgcggccccggtaatcatcgccgcaagcgctccccattcattcatccgtttccagtacagactgagcaagagcgccgggccgatagccgaaccgaagcctgcccacgcatatccgaccagatcaagaatggtgctgttcggattcatggaaagcaaaatggcgataacggccacgatcaataccgacaggcgtccggtcatgaccaattctttatcgctcgcttcccgtctgaaaaaggcgcggtataaatcttccgtaatggcgcttgccgttacgagaagctgtgaggaaatggaactcatgatcgccgctaaaatcgcggacagcaagaagcccgtaatcagcggatggaacaagattttagaaaaaataatgaaaatcgtttccggatcttttacggagaccccgaagtgatgagaatacgcaaccccgataatcccggtaagcaatgaaccgacaactgaaataaccatccagctcatcccgattctgcgggcgggttttaaatctttcacttctttaatcgccataaatcgtacgatgatatgaggctggccgtaatagccgagtccccatgccaaataagaaataatgctaatgacgctcgcgcctttaaagatatccaatagtttcgggttaacggcgttgatcgaatcaatcgtcgttgaaacgctcccgagctgggtaaaagcaacgatcggcacaagcactaatgccgcaaacatgatcgctccctgtacaaagtcagtcagactgacagcgaggaaaccgccaaacagcgtgtaaagcacaacaacaccggccgttaaaaacaaaccgaatttgtagtcggcgccgaatgccgattcaaataacctgcctccggataccatcccggacgatgtgtacagtgtgaaaaagatcataataatcacggcggaaacaattttcagcaatgatgacgagtggcggaaccgtttatcgaaaaaatcgggaatcgtaatcgcatcatccgcaacttccgtgtaagcgcgcagcctcggagcaagcagcagataatttgaatacgcgccgatcgtcaaaccgagcgccagccataaggtcgataaccccgttgcgaacattgcgccgggaactcccatcagcatccatgcgctcatatcggccgcacctgcggacagcgccgttacgaacgggccgagtcctcttccgcccagcatgtaatcattaatattcgttgtcttcctgaatgcgtaccagccgattaacagcatggcagcaaagtaaatgccaagagatataattagttcaatactcacgtttttggaccctctcttctttcatgtaaatgttgcatcacctctgtagattagtagtgccggaatatgcgccggcgatccagcctttagtcgtcattccatgcggatcgcatgatttagtgctggctatggttactaaacctaacaaagtatccccgatcaatcaactctcgaaacctggcccgctcaaggaaaaaatccccgccaacatagaacagcttagagatgaaaacgctaccaatagaatataaaagtaaaaattttctgacatataattcgtttctctttctccccgatttaggataaaatagagagggtttcatcatgcctcagaaggcggcgttttgttgctttagagggctcgtttttgatatgatcagtattatatgacgaaacggagaattatgcggaggtggatcttatgtcacgaatttctatagaagaagtaaagcatgtcgctcatttggcgagactcgccattacggatgaagaagctgaaatgttcacagaacagcttgacagcatcatctcgtttgccgaggagcttaatgaagtggacacggataacgtggaaccgacaacacacgtgctgaaaatgaaaaacgtaatgagagaagatgaagcgggtaaaggccttccggtcgaggatgtcatgaaaaatgctcccgatcataaagacggctatgtccgtgtgccatctattctggattaaaggagggagacagtatgtcattatttgatcacaaaatcacagaactgaaacaaatgatacataaaaaagaaatcaagatttccgatcttgttgatgaatcttacaaacggatcgcatccgtggatgataaggtgcaggcgtttttacagcttgatgaagaaagagcccgcgcttacgcgaaagaacttgacgaagcggttgacggacggtctgaacacggtcttctcttcggaatgccgatcggcgtcaaagacaacatcgtgaccaaagggcttcgcacaacatgctcaagcaaaatcctcgaaaacttcgatccgatttacgatgcgacggttgtggagcgccttcaagccgctgaagccgtaacgatcggaaagctgaatatggacgagttcgcgatgggttcttctactgaaaactccgcgtacaaagcgacgaaaaacccttggaatctcgatacggttcccggcggatcaagcggcggttccgcagctgcggttgccgcgggcgaagtgccgttttcactcggatctgatacgggcggctccatccgccagccggcttctttctgcggcgtcgtcggattaaagcctacatacggacgcgtgtcgcgttacggtttggtcgcttttgcgtcttcactggaccagatcgggccgatcacaagaaccgtagaagataacgcattcctgcttcaggcgatttcaggcccggacaaaatggactctacgagcgccaatgtcgaagtgccggactttctttcttcattaactggcgatattaaaggcttaaaaatcgccgtaccgaaagaatatctcggagaaggcgtcggcaaagaagcgaaagaatcggttttagccgctttaaaagtgcttgaagacctcggagcgacatgggaagaagtatctctgccgcacagcaaatacgcgcttgcgacgtattatctgctgtcttcttccgaagcgtctgcaaaccttgcgcgctttgacggcatccgctacggctaccgctcagacaatgcggacaacctgatcgacctttataaacaaacacgctctgaaggattcggcaatgaagtgaagcgccgcatcatgctcggcaccttcgcgctcagctccggctactatgacgcgtattacaaaaaagcgcaaaaagtgcgcacgcttattaagaaagattttgaagacgtatttgagaaatacgatgtcatcgtcggaccgacaacgccgacaccggcattcaaaatcggcgaaaaaaccagcgatccgctcacaatgtacgccaacgatattttaacgatccctgtcaacctcgcgggtgtgccgggaatcagcgtgccgtgcggatttgcggacggactgccgctcggactgcaaatcatcggaaaacacttcgatgaaggcactgtataccgcgtcgctcatgcttttgagcaggcaacagatcatcataaagcgaaacctgaactgtaaggggtgaaatgaagtgaactttgaaacggtaatcggacttgaagtccatgtggaattaaaaacaaaatctaaaattttctcaagctcaccgacgccattcggcgcggaagcgaatacccaaacgagcgtcatcgaccttggctatcccggcgtgctgcccgttttgaacaaagaagcggtcgaattcgcgatgaaagccgcaatggctttgaactgcgaaatcgcaacggatacgaagtttgaccggaaaaactatttctatcccgacaacccgaaggcatatcaaatttctcaatttgacaagccgatcggcgaaaacggatggatcgaaatcgaagtcggcggaaaaacgaaaaaaatcggcattacccgtcttcatcttgaagaagatgcgggaaaactgacgcatacgggcgacggctattccctcgttgacttcaaccgccagggcacgccgcttgtcgagattgtatctgagccggatatccgcacaccggaggaagcttacgcatatctcgaaaagctgaaatcaattatccaatacacaggtgtttccgactgtaaaatggaagaaggttcactgcgctgtgacgccaacatttccctccgtccgatcggccaggagaaattcggcacaaaaacggagctgaaaaacctgaactccttcgcgttcgtgcaaaaaggacttgagcatgaagaaaaacgccaagagcaggtgcttctgtcaggcggagtcattcagcaggagacgcgccgttacgatgaagcgacgaaaaaaaccattttgatgcgtgtcaaagaaggttcggacgactatcgctatttccctgagcctgaccttgtagagctctacattgatgacgaatggaaagaacgcgtaagagcaaccattcctgagcttccggacgagcgccgcaagcgttatatcgaagagctcggcctgcctgcttatgacgcaatggttctgacgctgacgaaagaaatggctgatttcttcgaagaaacggtcaataaaggcgcagaagccaagcaggcatcaaactggctgatgggtgaagtctcagcttacctgaacgccgaacaaaaagagcttgaggatgtcgcactgactcctgaaggccttgccggcatgattaagctgattgaaaaaggaaccatctcgtccaaaatcgcgaagaaagtctttaaagaattaattgaaaaaggcggcgacgcagaaaaaatcgtcaaagaaaaaggcctcgtgcagatttctgacgaaagcgtgcttctgaagctggtaacagatgcgcttgacagcaacccgcagtcaattgaagacttcaaaaacggaaaagaccgcgcgatcggcttccttgtcgggcagattatgaaagcctccaaaggacaggccaacccgccgatggtcaacaaaatcttacttgaagaaatcaaaaaacgataaaaaaaagcagccgcctctaagggcgctgctgacacggagaccggtaagcgccggtctcttttttttataagatgaaataggtttcaatggaagcccgcagcgtttcaatctgttcagttccgctgcctgccaagttggacagcattcctttaataattggttttcgcggctcttcctttgcgcattcctcttcaatgacttcaagcgatacgaggacgtcctcaggcagcccctgctgtgcttttatcttctgaatatccgcaagcagtctttctctgtccgccgcgggctgagtgaagatatcctcaggcagcagcggatcgggattgtctcttatcagtcccgtaatcagatcatcgattctggcaatcagaaaggccgccacgttttccgtccggaatgccgtatgttcattaaaaatcaagaaatgaatataggagctcacaattccttgcgccataacggacgcatccgctaaaaacggtgtgacggcatctccgtaaacggagagcaacgcatcccgatacagcatgttaaattgaatattggcctcatgaaaatactgtttgaccttttgattttcaggaatgaccttttcgctcagcaagagaatgataaagtccttgtgttccataaattcctggaattgatatgcgatttgttttcggaatacgtccttaggcggtttatgctgatgttctgttttgattttctttatttcttccatagacatgccgatgtaatactcacatgctgagagcaaaaggtcttcttttgatttgaaatggagatagaaggccccttttgaaattccgcattcaccggcgatttcctgaatggttgttgaagaaaacccttttttggcaaataaatggatgcctgtttttatgattttctcttttttttcgttcatgacgtgcttccccttaatcctgaaaaatttagaaaaatttactgccttattagttgacgatgttgagttataccgtttagtattatatagaatgaccagtcagtcaataaaaattaacggaggacatgatgaaccacattattaactttgtactgaagaacaaattcgcagtttggctgatgacgattatcgttactgtagcagggctgtatgccggtatgaatatgaagcaggaatccataccggacgtcaacatgccttacctttcagtaaatacgacttatcccggagctgctccgagtcaagttgcggatgacgtgacaaaaccgatcgagcaggcggtccagaatttagaaggagtgagcgtcgtaacgtccacatcctctgaaaacgtctcatcggttatgattgaatatgattacagcaaggatatggacaaggcgaaaaccgaagtcgctgaagcgctggacagtgtcagccttcctgacgacgcgaaaaaacctgacatttcccgttacagcctcaactctttcccgattttgacgctcagtgtgacaagcggtaaaagctcgcttgaagacctgaccaaaaatgtggaaaacactctcgttcctaagcttgaaggcattcagggcgttgcgtccgtgcaagtttccggacagcaggaagagcaggtggaattctctttcaaagacaaaaaaatgaaagagtacggacttgatgaagataccgtcaagaaagtgatccaaggctctgacgtcaatacgccgcttggattgtacacattcggcaacaaagaaaaatcagttgtcgttaacggagatattacgtcaattaaagatctgaaagatatgagaattccggtcacatcttcttctgccgctcaaggtcaagcgggcggagccggtgcggcatctgcggcggacgctcaggctatgcagcaggcacagcaaagcgcgtcagcaggggtgccgacagtcaagctttctgacattgccgacattaaagatgtgaaaaaagctgaatccatttcccgcacgaacggaaaggacagcatcggaattaatatcgtaaaagccaatgacgccaacacggtagaagtggccgatgcgattaaagatgaactgaatcaatacaaaaaagaccataaagggttcaagtacagctcgactcttgatatggcagagccgattacagagtcggtggatacgatgttaagcaaagcgattttcggcgcgatttttgcggtcgtgatcattctcttattcttaagagatattaaatcaacgatgatttctatcgtttccatcccgctgtcactgctgattgcgcttcttgtgctgaatcagcttgatgtcacattgaacataatgacgctcggtgcgatgacggtcgccatcggacgggtagtcgacgactcgatagtcgtgatcgaaaacatttaccgccgcatgaggctgaaagatgaacctttacgcgggaagcaattggtgcgtgaagcgacgaaagaaatgtttaaaccgatcatgtcatcaacgatcgtaaccattgccgtattcctgccgcttgccatggtcggcggacagatcggcgaactgtttatgccgtttgcattaacaatcgtcttcgcgcttgccgcatcgctgttgatttcgatcacactggtgccgatgcttgcgcacagcttattcaaaaaatcgctcacaggcgcgcctgttaaagcgaaagagcataagccgggcagattggccaatttctataaaaaagtgctgcattggtcattaagacataaatggattacatctatcatcgcggttctgatgcttgtcggcagtttgttcctcgtacctctgatcggcgcgagctacctgcctgcgcaagcggacaaaacgatgcagctcacatatacgcctgaaccgggcgaaacgaaaagcgaagctgaaaaagctgcgcaaaaagcggaagacatgctgcttaaacgcaaacatgtcgataccgttcagtattcattaggctcgcaaagtccgctcggcggaagctcaaacggcgcattgttctacgtgaaatacgaggatgacacgcctgattttgacaaagaaaaagacaatgtcttaaaagaaatcaaaaaaacatccagccgcggcgaatggaaatcacaaaatttcagctcgtcaggcaacaacaacgaattaacgtactatgtgtacggagattcagagtctgatattaaaggcacggtcaaagacatcgaaggcatcatgaaaaagcagaaggatctgaaagacgtcaactcaggcctttccagcacatatgatgagtacacgttcgtcgctgaccaggagaaactcagcaagcagggcctgacggcttcgcaaatctcccaagccctgatgtcccaaacgtcacagtctcctttgacaacggtgaaaaaggacggcaaagagcttgatgtgaacatcaaaacagaaaaagaccagtataagagtgtaaaagaattagaggataaaaccatcacatcgcctgcaggccaagaagtaaaaatcggcgatgtggcgaaagtgaaaaacggcacgacatccgataccatttccaaacgcgacggcaaagtgtacgctgacgtaacggcaaccgtcacttctgacaacgtcacgaaggtgtcatcagccgttcaaaagaaagttgacaaactggatcacccggacaatgtatcgattgataccggcggtgtatcagcggatattgctgattcctttacgaaactcggcttagcgatgcttgccgcaatcgccatcgtatacctcgttcttgtgatcacgttcggcggagcattagcgccgtttgcgattctgttctcgcttccgtttacagtcatcggcgcattagccggcctgtatgtatccggagagacgatcagtctgaatgccatgatcggtatgctgatgctgatcggaatcgtcgtcacaaacgcgattgtcttaattgaccgcgtcatccataaagaagcggaaggcttatcgacgagagaagcgctcctggaagccggctctacgagattgcgtccgattctgatgacggcgatcgcgacaatcggcgccctgcttccattggcattgggcttcgaaggcggcagccaggtcatttctaaaggactcggtgtcactgttatcggcggtttaatcagttcgactctgcttaccctgctgattgtgccgatcgtatatgaagtattagcgaaattccgtaagaaaaaacctggaacggaagaagagtaagacagcgggccttggctccttaaacggagccggggccttttttcttctggcaattcctgtacatattgttgcgattttctcaagtcatagtataattaaaggttgttagtgttaataatggatcggatactcttaagtaggatgatgagataatgaaacgtgcacgcataatatacaatccgacttcaggacgggagctttttaagaaaaatcttgcccaggtcctgcaaaaatttgaacaagccggttatgaaacctccacccatgccaccacatgcgcgggggatgccaccaacgccgcaaaagaagccgctttgcgggagtttgacctgattatcgcagccggcggagacggaacgattaatgaagtcgtcaacggccttgcaccgttagacaaacgcccgacactcggcatcattccggtcggcacgacaaatgacttcgccagagcgctgggcattccgagagagaatatactgaatgccgctgataccgtcattaacggcgtagcccgcccgatcgacatcggacaggtgaacggtcagtattttatcaacatcgccggcggaggccgtctgacggagctgacgtatgatgtgccaagcaaactgaaaacgatgctcggccagcttgcttattatttaaagggaatggaaatgctgccttcacttcgaccgacagaagtcgagattgaatatgacggcaagctgtttcaaggcgaaattatgctgtttttagtgacgctgaccaactcggtcggcggattcgagaagctggcccctgattccagcctgaatgacggcatgtttgatttgattattttgaaaaaagccaatctcgcggagtttatcagagtcgcgagcatggcgctcagaggcgatcatattaacgatcagcacattatttacacaaaagcgaaccgtgtgaaagtcaatgtatcagaaaagatgcagctgaacctggacggcgaatacggcggcatgctgccgggcgaattcgtgaacctgtaccggcatattcacgtcatcatgccgaaggagaaagcggaacagctggatgattaatacgcggacaaaatcctaaaacagtattcgttttaggattttgtcatcttttcagcgtgatcggaaacctttgaaggctgacattgaatttgaaggttttccagcacgctgaaacaaggctattggtaaaactagaggtgattatagatgaaaatgaaacccccgatagaaaaaaatgaatactatgatgtgacatttgaggatttgacgcacgaaggagcgggcgtcgcaaaggttcagggcttcccgattttcgtgccgaacgccctgcctgaggaaaaagcgcaaatcaaagtgacacgcgtcaaaaaaggcttcgctttcggccgcttgattgaactgaaagaagaaagcccgcacagaacggatgccccgtgtccgatctacaagcaatgcggaggctgccagcttcagcacatgacctatgaaggccagctcttgtttaaacagaaacaagtcaaagacgtcttagaacggatcggcaagctgaacctttcaaaagtcatcgtgcatccgacgctcggcatggaagacccgtggaactacagaaacaaagcgcaggtgccggtaggagaacgggaaggcggactcgtcgccggattctatcagcaaagaagccatgacatcatcgatatgagcgcctgcctgatccagcaatccaaaaacgacgaagccgtccaagccgtcaaagacatttgctcctcatacggcgttaaagcctacaacgaagaacgccacaaaggctggctccgccatatcatggtcagatacggcgtcgtcacgggcgaaatgatgattgtcttcatcacaagaacaagcgattttccgcaaaaagcgaaaatcatcgaagacatcacaacgcaattcccgcacgtcaaatccatcgtgcagaacatcaacccaaataaaacaaacgtgatctttgggaacgaaacaaacgtcatctggggcgaagaatacatctacgacctcatcggagacgtcaaattcgccatctccgccagatcgttctatcaggtcaacccggaacagacaaaagtgctctacgacaaagcgcttgagtacgcggagctgcaaggggaagaaaccgtcatcgacgcctactgcggcatcggaacgatttctctatttctggcgaagcaggcgaagaaagtatacggcgtcgaaatcgtgccggaagccatcgaggatgcaaaacgcaacgctgagctgaacggcatcacaaacgcagaattcgcagtcggagaagcggaaaccgtcattccgaaatggtatgaagaaggcatcacggccgacaccctcgtcgtcgacccgccaagaaaaggctgcgacgaagccctcctgcgcacaatcatcgacatgaaaccgaagcgagtggtgtacgtatcctgcaatccaggaacgcttgcaagagatttgcgggtgcttgaggatggcgggtatcagacgctcgaagtgcagcctgtggatatgttcccgcatacgaatcatgtggagtgtgtggctgtgctggaattaagagaaggcaactaacccttagggatggttgcctttttttaatccgcatttttttttgcattcaggacgaactcgtgacatgagaggagtaccagaagatgtttggttaacacctataatatagctttctatacatctctttatgtaatattcactctagaggggcagcttttttaatacactttcatatcttgttttttctccttactaatcattactttttctaaataactcttaagaaatacattatctatcctgtctggaatgtaacccagacgtttatttagtatattctctatgatatacattttctttgtgtaatattggtaactatccgttgcgatttgaacactttctgattcatttcccttttctgattcaagtcgagatttatatagctgatcatacttctgtttgcgtatttttcttgagagccgcagtaaatgaaataattcaattgttggcagagtcattagttctggtgtagacttatccaaatctaattcagaagtatgctcacgatattctatgatttcccgtttgccatctctctgaacattatgtatgtacattaagcaaaaactacagtaatactgattatccttttgaattgaagttgcacaataagggcatgtttccattacgttctcctttctgaatattctaagataatatgtatttcggttacaaacaagaattttaaatagtattagaggttcttaaccaataaaaaccctttttatgataaagggtttattgattacagcatgtataagtttcatgcaaaatcaataagtaatccctatgtatagaaaatccaccgagcctaaacccaataacaaaacgcgaaaataataaattatatcgttataattatttataaaaagataataaagttggataaaaatgaggaaaatcctggcgggaatgacgatataaagttagtgaacaacggtatagaatcttacttttcgaggtgaacagaatgggagaagaacaagacattattacagtaacggatcttcgtaaaaaatatggatcatttgaagcagtgaaaggggtatccttttctgtcaaacgcggcgagctgtttgcatttctgggaacgaacggtgcagggaaatcgaccactatcgatattctctgtacgctgattaaaaagacatccggaaaagtggtaatagacggttatacgcttggtgaggggaaagagaataatcatatccgcaaaaagatcggagtcgttttccaagagagcattttggatgaacgattgaccgtttatgaaaatatcatgaaccgcggacaatattatcatttaagcaaggcacaagtgcaagagaactatcagtttgtaacagactatttaaaattggatgatattaaggagaaaaaatacagcgatttgtcaggcggacaaaggagaagagcggatattgcccgtgccatcatccataaaccgactatattatttttagatgagcctactacaggtcttgatccgcaaacgagagtttttgtttggaatgcgattaaaaggctgcaggaagaaacaaacatgacgatctttttaacgacccattacatggaggaggccgctgtggctgataacgttgtggtcatcaaagaaggacgtctgatcgcagagggtacaccgagtcagctgaaagatcaatatgcgtttgacagtctgcatatgatgtttaagcaaggcgttgatccgactgcatggtttgaaaataaacaactggattttacggttaaaaactctatttattcccttcgtgtagagtccactctccaagcgtttgacattttgaaaggtcttgaaggaaaaatcgaatctttcgaggtgattaaagggaatatggatgatgtgtttatccatattatcgaagaacaaggaagcagtttgccagtaaaggggagcattgcataaatgaagtctttatccagtttaatcagcagaaatataaaaatatacttccgtgatcgaacgcttttgcttctttctttgctgtcagtatttatcgtcattctgttatatgccgtgttcttacagcagacacagctggacgccattaaggccttggtcggttcgacagatgattccaaagcaatggtgaacgaatggatggtggcgggattgctgtccattacagctgtgacaacgactttaggcgctttcggaattatggtgaaagataaagaaagcaagagaacgtatgactttttaacagctcctttatcaagggcgaccatccaattgagctatgtcattcattcatttgtcatcggcttgatcttttctttcatcgcctttttaggctgtgaaatttttctcgtttcaacaggcagcaaacttttaagcggaacagatatacttgaagtattggggatcattattctttcagttgcactgtcaagttccataaatttatttttaacgctgtttattcatacacaaaatgcattttcgacgttaagtacgattgtcggaacagccatcggttttttatgcggagtatatgtgccgatcggcggcgtaccggtgtttgtgcagaagattattatgtacttccctatcagccacaccgccgttctgttcagaaaagcgtttatgacagactcagttgataaggtatttaaacatgcttccgcaacccaaatacaggaatatgaaaagcattacgggatcgtctacaagttaaacggccattttatcagtacggctgcaagcttgtggatcattgtcattacagccatcatatttaccgtcatatctattttcatatttaaaaaacaaaataaatgacctcttcagacgatacataacgatgtaacaggcagcatccgtttactggatgctgtctgttttgtttatcattattctttttgtgggctcaattcttaattcctcaaagagttctcagatttctcttgtgttgaagatatctttatttacactgtatcgggcagatatatcttgtgaataaataagttgatgtttttctggtgtcgtgaagtgaaagaggaccatggtagagtcacttctgcataaagatatatttttgtccattcacaaggtatgatgtcatttaatttcttactaataagctggtacagatcttgcattttccaaccttttcaccttcaatcgtcgagaaatcctagttataaaaaatagcccagcagagaagcgctgggccattattgatttatagaccgaagtagcttattacaaattctttatcgtcctcatcttcaggcaaaatccccaagttttgatattcccataccacttgccgttgtgttccgtttaggtctgaggcgatgacatcggtgtaatcgtagtcaattgagaatttaccgcttcgttcgagatgtaaagtgaggtttgtccataagtcctcgttgtttgttttaaattcatcccgtaactcttcaaagtaatcatgcaattcatatagaagttcgtcatatatatcttcatcaacgttaaagtgttctggaatatcatgtgaatatatatattcctgattttgtggagtagtaaagaagaagtaaacttctgaagaatcatctaaaatttcggcataaagagcaaccttctcccactcagaggggataatttcatttatttgctcagcgattttttgatatagtattcccatcttttcagtttccacaatatcagaatcctttttaattttttagccgcttgaaagcttattatatgtttagatactcttctatgaattttctatcttcctcatcagctggcagtatgccgagattttgatatttccaaacatctcgtctttgaaggtcatcaagttcagaggataaaacatcatcataattataatcaattgaaaactttccggtgttttctaattttaaagtgagatttgtccaaatatcttgattgcctagtttaaattcttcttttagttcttcaaatagctcttgaagttcaatcagcagttgatcgtaaatctcttcgctcacatcaaaatgttcaggtatattatgagaaaataaataatcactgttatttggtgttgtaaaataaaagtatatatccgctgagtcatcaagtatttcagcatataaaacgatcttttcccaattgagatggaatcatttcatttagatgttcagcaatcttttgatatagttcatccattgatgatcctctacctttgaattgttgatggcattatttaatatttagataatccttaacaaattctttgtcctcttcgtcttcagggaaaatccccaagttattgaactcccaaatcatttgcctttcgtattcgtccaaatcagattcaataacatcttcataatcataatcaattgagaacgttccatcgttttcaagattcagtgtcaaatttgtccatgcttcaggattattttctttaaattcattgtgtaactgtttaaataactcttgaagatctaataatagttctgtataaatttttttactaacttgaaattgttctggaatgtcgtgagagtatatatattcatcgttttctggtgtttgaaagaaaaaatacacttctctagagccgtctaatatttctgcataaagaacaactttgttccattcggaagggatcatatcattaatttgttctgctatcttttgatatagaacttccatcttttttgtttccattagattaaccccctggtttattttctatagtaacttgtctcgctctacgattacctatcttatattcaacattaaataatacaggtcttagtgaatctccctgataaacgggttctatattaacttttacttgcttaggaggttttccgtttaatgcctttgaccacacttgctccattttgtaccatttcccgccgctcctattaatctgagaattcatcggcacgatgttgtcgaactggcctgagcccttgaattgagtagcgattaggtggcctccgtcgtcatctgtcagacggtctggtttacctgcttttgactgcgcatattggttgcgttttgcttctcccagctgcaagtctgctttgacacttgtaattctaccatagttgtcagtagtgtacgtgtagccttcttttgttttgtagatgacattcggcttcaatactttctttctggtccatttcgcaaaatgctcaacgtatttgactctactggcgaagcccggtcttcttcttcccttagaggaagttccgtacggtttcggtgtgtaaggtactcctttggcagtaccacgcatggagtgggcgatagtggagaataacctccagttatagttagtactttgtctgtgagagaacgcccctccttttgtttatctatggatatttatagttttttaggttttacatgcaaacaaaaaaggcctctgaaaaaaagagagccttcttctaggggactgaccccataagatgagacaaataaaaacaccttcaagtttgaatacggatgattgttatccgaaattagacttggaggtgttttttctatggggacaagagtaagttatccggttgaagcgaaacagaaggctgtagaaatgagattggcaggcgtacctatgaaagagatcatgcaggagttgaatattaagaataagacacaggttcagacatgggttagatggtataaggctggtgatacacatcgattcgaacagcctgttggaaagcaatacacttacggaaaaggtccggagtattcttccgatttagagaaactgcaggcagagattcgttacctgagacaacagaatgaagttttaaaaaagtacaacgaattggaaaggaagttgatagcgaaacgtcagtcgaacttgtagaaatattgcacagcacaatgaccgtacaggatatctgtattcatttaggtatctctcgagcgtcttattatcgttggaagaagaatctgatgaaggatcatcccaagcgccatttggaaaaacaaatcggcacgttgtgccgagagcacaagtatcgatatggatatcgaaaaatcacagccatactaaaaaagagaatgtgtattaaccataaaacggttcagaaatcattcgcagagtgtaaaggcacaagggagcttgactgcgagacctacaagtcgagcagggacgaaagtcgggcttagtgatccggtggttccgcatggaagggccatcgctcaacggataaaagctaccccggggataacaggcttatctcccccaagagtccacatcgacggggaggtttggcacctcgatgtcggctcatcgcatcctggggctgtagtcggtcccaagggttgggctgttcgcccattaaagcggtacgcgagctgggttcagaacgtcgtgagacagttcggtccctatccgtcgcgggcgcaggaaatttgagaggagctgtccttagtacgagaggaccgggatggacgcaccgctggtgtaccagttgttctgccaagggcatcgctgggtagctatgtgcggacgggataagtgctgaaagcatctaagcatgaagcccccctcaagatgagatttcccattccgcaaggaagtaagatccctgaaagatgatcaggttgataggtctgaggtggaagtgtggcgacacatggagctgacagatactaatcgatcgaggacttaaccaatttgaatgtatgcttactgttatctagttttgagagaacactctcaatggtttggtggcgatagcgaagaggtcacacccgttcccatgccgaacacggaagttaagctcttcagcgccgatggtagtcgggggtttccccctgtgagagtaggacgccgccaagctatcttaacccagttcatgatgaactgggttttttatatgaaagatcacatagatatataaagctaatgcctttcaaaggcattagcttttttgtttacattgattttgctttgctgttgtgatgttgaagattgtttgactttattgtctcgagcattcttaaactgaacacaatcagcagcataaggagcatcagtgcagtaaacagccagaacgcagtttgtacgggatattcatctaagctccagccgacggcgatcggaaggagtgaacctcctaatccgtttgaagcgagcagaatactggtagttgtttctgtctttccgggataaaaatgattcgtgatgattagggctattgcaaacatgcctgccatgaatagccctaaaaagaagcaaagggcaaaaccgaaccatacgtttttgcttaatgctaatacggtaagtgcagccagaccgccaatgcttatgagacggagataacggtgatatgtcagcttttctgataccgggcctgttaataacctaccgataatcatccccgtccaatacactgtaactgttatcgttgccaaagagttggggatatcccatttctcagcgaagatggaggggataaaatgtacaatggaaacttcactgccgccgtaaaagaagaaataagcacccgccaaggcaataaacagcaatccgtgtgaccgataaccggtgctttcttttttagtgtcatcggaagagacctctttgcggatgagaagctgatcaatactgccgaaactcatctgcttccatgcgattaagagtgcaaaactggataaccctaatactaaaaaagcaattgtccacatgtggttgttgataagaaagcctgagagcagaggcatgaacagcgcacctaatccgtaggcgacttccatcttgctcatggccacagcctgtctttctttaatagcggtgaggatgatcgtgcctacacaggattccaccaatccggcgccaagccccgcgatgctgacgagaagaaatagcagcggccagggcggcaggaaggtgatgaacatttcacagctgatgagtgccaggccaaagataacgacgtttttgcgcccaagctttttcaccatgtatggcatgccaataactccgatgagaaagcccatgaactgagagaatactaatacaccgccattactgtagctttgtgaataatgtgtgagtaactcaggcagtacggctcccagaataacaagtgtaaaagcaatcgatccataagaaaaacagcttatccacagcagacgagttttcatcattttatctccttattggtaaaatcatatttctctctactcgtatgacatgatgtttttacaaaaaatccaagtattgttactatatcacataactttttctcgtacatccattatggtaacgttaacaaattgttaacattttttacaagaaagatcgttgacattattttcaataatttatacgataaaaagcgaaattctaataatttcataggggtggtatttgtgggaacgaaggaaatcacgaatccagacagcttgtattacagtgttgacgatgtagtaatggagcgcggagaagggatttacctgtacgatcaagagggaaatgagtacattgattgcgcctctgccacgtttaacttgaatttaggatacggtaacaaagaggtcattgatacggttaaagaacaagccgataagctcatccatgtaacatcatcttttcaaacagacgccgtaaataaactggcagaaaaactagtagaaatcgcccccgataatctcacaaaagtacaccctaaagtcagcagcggttccggtgcaaatgaaggagctattaaaatggctcagtattactccggaaaaaccgatgtcatctccttatttcgaagccacctcggacaaacgtatatgacttccgctttgtccggcaactcattcagaaaagaacctttcccgccgcaaatttcttttggcctgcaagtccccgatccctattgcagccgctgtttttataatcagaaacctgattcatgcggtatgctgtgcgtagaaagaattaatgattttattgagtatgcgagcaatggaaaaattgccgccatgattattgaaccgatatccggaaacggtggaaacgtcgttccgcctaaagagtattttaaacagttgagaaagctttgtgatgaacatgatatcgctctgatttttgatgaaattcagaccgggttcggacggacgggtaaaatgtttgccgcggaccacttcgatgtgaaacctaatatgatgacggtagcaaaggggctcgggggcacaggctttcaagtcgccgccactctgacggaggacaagtataccgggcttccggggtatacgcactccttcacatacggctcaaatgtgatggccgccgctgccgcttgtaaaaccatagatatcatgcagcgaccgggatttttggaaaatgtaacgacggtcggtcattatattatggatcgcttagaaacgatgaaagaggatttcgcttttatttctgaggtaagaggcgtcggtcttatgatcggtgtggagattgttaaagagaacaatgaaccggatgtggagctgaccaattatattgctaaacgggcaatggattacgggctgattctccggacatcccgttacggattcggaaatgtatttaaaatccgtccgcctttaaccataacacttagtgaagccgaagtgctctgctacagacttcgcaagctattggaggaaatcaagtgagagactatatcattgagcttggacaatttgtttatcaaaaggtgaaaaatcaaaaaggcacgctgaaaaaccggctcgtaaacggctattctccgggaggcgacgcccaatttaacatagacgccgctgctgaggaggcggtgctggattatattcaagaaaagggccatccggttgctttttacacggaggatggcggcctgaagctgattggagaagatccgcaatatattttaattgtagatccgatagacggaacgcgcccggccgccgcgggacttgaaatgtcgtgtatttcgattgcgcttgcttcgtataagccaaacgcaaagattaaggatatcgagtttgcttttttacttgaattgaaatcaggcgcttatatgtacggtgatgtatacagcgatgccattcattttgaagggtatcatggagaattgccgaatttgagcgaagtgcgggatattaaaaatatgttttggagccttgaatttaacgggcatccggcgcagctgatgacggacgcatacggccatctgattgaccagtcggccaataatggcggggtttttgttttcaacagcgcttcttattcgatttcacgaattatcacggggcagatggatgcttatgtggatatcggcaatcgtctgctgaaagatgatccgaagctgctttcagattttcagcaggtcgggaacggacaggtgctgcatttgtttccttatgatattgccgcaagcgtctttttggcgaagaaggcgggagtggtcattacggatgcgtacggccggtctttggacgaaacgcttctgacagatttaagttatcagaatcagcaatcatgtattgcggcatcaacgaaggagcttcatcaaacattgttagaccaaatccgctggggcagaaaggaagagaaatatgaaggcgttggtctggactcctaatgataagcttgaataccaagaggtggacgagcctcaaattcggaaatccaatgatgtgaaagtgaaaattttcggcaccggtatctgcggaacggacttaaatgtgctgaaaggaaaaatgaatgcaacccatcatatgattatggggcatgaatcggtgggagcggtcgtggaaatcggaccggacgtgacaaatgtaaaagtcggagaccgcgtcgtgatagatcctacgcagttttgcgggaaatgtcattattgccggagagggctgacgtgttattgcgaaaccttcgaggattggcagctcggaatcggggcgcacggaacgtttgcggaatattacgtgggggaagacaggttcatgtacagaattccggattcaatggaatgggagcgggccacattggttgagcctctctcctgtgtgctgaatgttgtggacaaggcttcgattcagccggaggactcggtcttggttttgggatccggaccgatcggactgcttgtgcaaatgatggtgaaaaaaatggcgcgattgacggttgcgactgaaataggcagtttccgaagcgaggcggcaagccggatatctgattatgtctaccaccctgaagcattaactgtggatgaagtgaaacggattaatcaaggaagaaaatttgatgtgatttttgacgcgatcggcaaccagcttgattgggcttatccttttattgaaaagggaggcagaatcgtgccgatgggctttgatgatacgtatgagatgacggtcaggccgtaccagctgctgtcaaacggcgtaacgattgtgggcacaggtgaagcccgccagatcatggaagccgcgttagcatgcgcgtccgaccttccgcagctctatgattttattacggaaaagacggaactgaagaattatgaagaagccgttgatcatctcatgggcatcgacccggtgacaaaagaaagaaaggatatcagcgcaataaaaacgattcttgtgtctgatccggaacttttataaaagcggaaacggctccagtgagagccgttttcttttcttatttatacggcttgcacatttctttaaagtttaatatgatactctttgttaacaattcctttcctcaacggcattatactctgagcgtgtcctctttttccccgtaagcttgcctcatattccccagatgaaaatcaatgtttccaactgatagggtgcggatttttatagtgaaaaggagtcgttatcatttgaaagattatacgttacagcagcaatggttcgggaatgtccgtaaagacattctggccggtattctggttgccctcgctctgatccctgaggcgatcggattttcaattattgcaggtgtcgatccgatggtcggcctttatgcatcattttgtatcgcgattattatttctatcttcggcggcagaccgggaatgatttcagccgctacgggttcaatggcggttgtcatggtgacattggtggctgattacgggctgcagtatttgtttgcggcaaccattttgacaggtattattcaatttattcttggtgtcagtaagatagcgaaattgatgaaatttattccgcgttcggtcatgatcggatttgtgaatgctttggcgatcttgattttttctgcgcagctgccccagttcaaaggagcttcatgggtcatgtacgccatgcttgccggatcactggctatcatatatctattgccgaaggttacgacggctgtgccgtctccgctggtggcgatttttgtcatgacgatcattgcggtggtcttccatgcggatgtccgcacggtcggtgatatgggcgggatcacaagttcacttccgcatttcttgataccggatgttccgtggacgtttgagacattgcggattattttcccgtattctctggcgcttgcattcgtcggattgcttgagtcattgctgacagcccagatcattgatgaaatgacggatacggatagtgataagaacaaagaaagccgcggacaaggcatcgccaatattgtgaacggatttttcggaggcatggccggatgcgccatgatcggccagtctgtcattaatacgaaagccggcggacgcggccgattatcggcttttacggccggcgcgtttttaatgtttttaattgccgtattaagcggtatcgtcgtgaaaattccgatggctgcgctggtggccgtgatggttatggtgtccatcggcacgttcgactggtcatcgattaaaggtttgcggaaagcgccccttactgattcgatcgttatggttattaccgtcgtgacggtcgtcctgacaaatgatttatcaaagggtgtcttcgcgggtgtgctattaagcgcgatcttctttacggctaaaatttctaagctgaagattgtgtcacattccgaacagaaagatgtcagaacttataaggtaacgggacagatcttttttgcttccgtgtctgagctcatgaatgccatcgtttatgatgaagacgtgaaacggattgtcattgatttgaccgacgcccacgtgtgggatgattcaggagcggcggctcttgagaaaattgtcgccaaatgtaaagaatacggaattgaggctgaattaaagggattaaatcagaaaagccgagatttaatgaaacaaatggcatagaatttgtgaagtccggatgaatatatccgggctttttttcggttaaatttgccggggtgcattgttataatgaatgagacttgaaaaccgtatataggagacttgcatatgatgtggcttcagaagttgaaccaagtgttggggagaatcatgccgcttttgactccgtcaagtgtggcggcgggtgtgctgttatctcagcatatcagctggatggccggcgctgtgccgtggatatttgcatttattacatttacgggcagtctgagtgccaattttcaatcgctgaagcgcagtatcgagaagccgctcccgatgatcatggcattgtttgttctgcatattttcatgcctgtttttgcatggggaagcggccatctgattttcagcggtgaccctttaactgtgacggggctgattatgggtgtggtgattccgaccggaattacgagtttgatttgggctgcgatgtataaggggaatgtcggattgacgctgtctattatcctggttgataccgtgctttctccttttatcgtaccgttaagcctgtctgtcctggcgggggcgaatgttcagatggatgtgtggggaatgatgaaagggctggcggagatggtggtgattccatccatcgcagggatgatagtcaaccagttttccccgccggtaaggactcaggcaataagccggtcgctgtctcctttttcaaaaatctgtctgatgattgtcattgccattaacagttcggaaatcgcgccgtatgtcacgcacgtggatatcaaatttgcgggcatcgcaggcatggtattttttattgccatgacgggttatgccgtggcatggctgatcggaaggctgatgaagcggagccaggatgaaattgtgtctctgatttatacggggggcatgcgcaatatcagcgctggagccgttctcgccgtgtctttttttccgtctcaagtggcggttccggtcgtcatcgggatgctttttcagcaaatccttgcagctttgttcggctatttgctgagacgctttgaacttaagccggtcgtgatgaagtatgaaaaaaaccgctcagctacgtgagcggttttttccgtacagccagcttagtgctgcattgaattgtcgtttgaatgcttcttgatggtgcacggcgccttcttcaacagtgaaagagagctgagattgagaaaagcctttttgcttgaggctttcgtacacgtctttatttagtcggatcatggtgttttggatgttgtttttatgctcagcttcgcggctgccgacagacatatagatacgccgccgtgccggacgcaaagatgcggagcggacataatctgctgatttttcataccagaaggaaccggaaatacaaccgattctgccgaatatttcaggcttttggagcatcgcgtatatcgaaaacagtccgcctaatgacgcgccgatcagtcctctcgtttccggatgtgcagaaatgtgatgcatatcttctacagttggaatgatgacatttgtcagctcctcgagaaagagcctccctttgccgccgaaatcatgaaacgcagggctcagggaaggcgcgggccacggcgtgtactcatcgagcctgtcagccggtttgatgccgatgaaaatcaattcgggaagtgttccgttcgcaaattgggattcaagcttatccatctgttctaaaaacaaagaacccccgtccagtacgtacacacagggtaaagcccctgtttgaaccgaataggagggaggaagatacacagtgcattcctttccgtttatccggtgttctgtaagggtgcctctcatgcatccagccccttcttttgcttaaacagaagaaaaaagaaataaggaacgccgagaatcgcaagaataattcccgccggcacttctgaaggctgaaagaacaatttgcccgcaaagtcggcggatgtgacgaggagcataccgaccaatccgctgaccggtaatgagtatctgtgctcaatcccggcgagcctgcgggaaatatggggcgcgatcagtccgacaaatgccatgctgcccgctgcggttacacatgcgctgatcaaagcgatgcaggcaatgagtaaaatcgttttttctttattggttgaaacaccgaggcttttcaccgtgtcctcatcgaaacgaatggtatccagcaatgacgttttcgccataagcagaggaatgaacacgatcagccacggaaggatcgccgtaatggtcatccagtttgccgaccagatgctgccgtttttccaaaccatcgccatctcataatcctgcgggtccatttttaatgaaagaaataaagacagcgcgctgaatccggaattcatagcgatcccgacgagaataattctgcccgattccagatgcccccggtgccaggcgaaaatatagatcagcacggccgccatcaatcctccgatgaggccgaagacaggcatacccatcgcagaggcaagtgccgtcgcttcagattgtccctgaaacagaagcataaacgtgacgattccggctccggctcctgcattaatgcccaaaataccgggatcggcaagaccgtttttggtaatggcctgaataacggctccggctatccccaatccgagcccgatggcagcagccatgacaatgcgcggcagcctcagctgaaacagcaaaatgtcatattgcggattcggatggatgcggaaaagggtactgagcagttcacccggctttgcggaaaaagaaccgcttgtcatgctgaaatagcttacgagcaatatgagagcaatcagaatgatataaattccggccattttacgcaccacgctgatcccctccttttcttttaatcaaataaagaaagaaaggaacaccgatgatagaagtgacaacttcaataggcgtctcaaacggataattgatgaatcggctggcaagatcgcaaagggtcaggaagacgccgccgatgatgcacgcgcatgggatcagcctgctgtagtccgatccgacgagaaaacgtgtgatgtgcggaacgaccaaaccgacaaatgcaatttttccggcgagtgccaccgagcttccggtcaatatgacaacggccgccatcgccatgagtttgatggttcttttctgctgtcccagactttttgaaatgtcgtctcctaatgatacggcagtgacctttttgctgagaatcatggccgtgatgattccgatcgcaaaaaacgggacggccagtttcaaaaaatcagggttcatttgatgcagtctcgcactgtaccaaaaactgagatcctgcgaaatttgaaaataaatcgaaagcgcagccgacagactgctgagaagcatactggtcaccgttccgatgatggcaagctgcaccggggtaaaaccgccgggaagaatggaggccagcccgaaaacaagagcggcgccgaatgcggaaccgataaacgaatatatgatcatttcaatggatgtcgattgagggagcaataccatgcaaagggtgatgataaaagcggagccgtccgacacacccatgatcgaaggcgaggccagatagttccgtgtgattccctgcatgagcgctccggaaacagcaagggcggcgccgataaacatagcgccggcagccctcgggattcttgaatgccatatgatctgatggtcggtattctccggattaaagtgcagcaatgcggagaacacggtatggatgtcaagctgctttgcgccgtataaaacggaaagcagcagtgacagaacaatggcaatcggtgaagcaatgataatcatgtgtgtccgccgttttgcatacatgtgaaaaacctactctttattagtcttgagtcaacttgtcagccgcaacctgtaagaagctgattttactccacgcggttccgccttgggctaatggatcaatcgtattgacgtatacatggtcttttttgactgccttcaggctcttccagatcggatttttctctaagtctttcaaagcgcccggcttatctgcgttttcgtcatcagagaattgtacgaagatatggtcagggttcatttcgcttaatttttcaagagaaatcagttcctgcgctttcgccgctttgacttcgtccggcgccttcaggcctaaatcaccgtaaagcgtggagttgaaatatacttgttcaggataaatataaatattgccttgtctgattctgatgaccagcgcgtttgactgtttcgctttgctgttgatctttgtttttgtctttttcaggtcctgttcgtaatctgcgatgatttttttcgcttttttctctttatctgtaagctgggcgagcagcatcatgttttctttccagtttgatgagatatgagagacagggatcgtttcagcggtgccgctcaattttttcaacgttttttccgggaatttggttgatgccagaatgacgtccggctgcagctcaagaattttttccatattcggctgcattttttctcccgtagatacggatttatctgtaatatctttaaacagttccgggaatttgccggagaaagaaattgctcctgccggatgaacgtcaagcaatttggcgtcttccattgattctacgctgcctgtaatggcgattttgtcagtcggcgctttgacttcatatgtttttccgagatattcgattttctttttatctgaagaagcgtcctttcctttacttgctgtatcagatgtttctgagcttccgcaagccgcggccgtgaaagccaaaagcaaaatcatgaaagcgaatgccaatttcttcatctattgttcctcctgttcaattgataactattatcaattggaattatagagaatgaacagggataagaccatggataatttccggcattaccatggacgatcttcggataaaatggaaatgctttgctcgatcatccgctgatgtccgcttggagaatattcaatccacgggtcagatgatatgggaaacacgcgtttatcgctgacggctctaaggttctgccatatcccggtctgctgaatccgctgaaaataacgaagcgtttccggttctttacaagtgaaaagcatgatgcagtcagcctggcaatcagccagcatgtccaaggaaatcttttcgtcaggagcaaaagattccggttttgcggaggcaaagcctaaatcaccgaagaagacatcctcaatactgttgttatgggcgatgtacatattttctttatatacacggacaaataagaaccgctgatgccgcacgtgtttcagagcatctttcgctgaatgggcgagactttgataagctttaagccagtgccgcgcttcctgctcttcattcaaatatgcggcggtgcgaagaaactggtctctccaattctcttgagccggaaggtaaaaaacttcagtgatgtcattcaggcgctgtttttcttcttcactgacagaatcaagactgaaaatgatgtccggggcagcttgggaaagcgtgtgcaggttctcttcccaatttgcattatagcggtaagcactcaggtgaaccggaatatcggaagagaattgtttgtaataataggccgtccatttcgggtgcagcgccgcagcataaggcacgtgatgcagaggaatcagatgccccatcgtttcttttccgtacgcggccatttttgtgcgcctttttttcatatagcttgtaggtgagctgccggtatgttttttaaagatgcggctgaaataaaattcgtcttggtagccgatttgatgagcgatttcccgcagtttgcagtttgccttggccatcagttttttcgcattggttatgcggatgtctgtgatatattcagttacgctctgcccgtatagttttttaaaggtttcactgtaatgcttgggactgattcccgccatatgagcgagctgggtgagcgtgatttttgtgtcggactgagcatgtatgaattgttttgtctgttcgatcgccgctttcgtattattttgatggcatacttttgcagcataaaggtcatacatcagctgctgaaagtcggctgtatatttcattttctgcaatgcatccgccgatcgcacgttttcagaaagtgactgaagccggcttgtcaaatgatcaaccgtttgtaaattcatttgctgaagtccgtggaagatgtcttccccgttatccggaagcatcgcttcatcatctgatgaataggagaaaacacggagtctgacgatatataaatggatgccgcctgacggtataggggcaatattgaatgtctcatcacaaggacagatgtagagcgtttccttctgcagcggaaagctgtctgttccgatatcaatttgtccctcgcctttcacatgaaagatcaatacgggggaatcagtgagctgatgctctgacagaaggtcggctgttttttttacggagatgatatcaatgggctgaaagaataatatgtttttcatgagaaaccaccttttaggaaacattcatttaaatgataactgttatcatttaaattgtaccaaataaatgaatgttttcctataaaaagcggaaatgtgaaatgcgtcaaaatgttacacgtgtaacacgaatgttgtcagtatatgaggtattgttttcttatagttttgaattggtccagccggcgttgatatgtgccggtgatgtcttcaatggaagcgcctttttctatttttttgcgtacccagccgttaccgatcagcttgtcaaatgagcctgtcggcaagaataaaaagtcattcggatataagtcatgcatggttttcagaatggagagccctgtttttgccgcttcaaatgtgtttctgtttgttacgtagacttgtacgccgtggcacagcttgctctggtgcttggagaagctggggataaatgatgcggctctgaaggtgacgcccggaagcttgagactgttcaggcgttcttcgagctcggtgcttttcatataaggcgcgccgatcagttcaaacgactttgtcgtgccccttccttcggatacgtttgtgccttcgattagtcctgtcgccgaatatgcgaatatgctgtccggggtcgggatattaggcgaagggaggacgaacggcagaccggtatcttcaatcgtcatcgtccgcttccagcgcttcatttttacgacggtgaggtcggcgccaatatgaaactctttattgaataaaagagcaagctcaccgatcgtcatgccgtgcttcagcgggatcggatacagtccgacaaatgaagcgtaatccggttcaagaaccgggccgtccggatttcgtccgccttgcggattcggccggtccaatacataaaaaggtatgcctttttcttttgccgcttccatggcataggccattgtataaatgtaggtgtagtatcgcgttccgacatcctgaatatcgaaaatcagcacatctgtatctttcagcatgtcaggcgtcggtttcctcgtttccccgtacaggctgtagacgggaagccctgttttttcgtctatataggatgtgactttgtctccggcctgagcatcgccgcggacaccgtgctccggtccgaataatgccgtcaagtggatgtctggtgcctcatacagcacgtcaacgctgctttttaatgaattgttcacaccggtcgggttggtgatcagcccgaccctttttcccttcagttcctgtttataatctttcagcaggcggtcgatgcctgtttggatgcttggtttcttggcggtatgaaggtttctgtcagaagccgccgagactgccgtcatagcactgatgacgactaatccggcaataagcgcagccgtttgtgttttcatgatcagtcctcctgtttaaagcggttttccggtcttcagattgataccgaaaccataaggatacagtgtcgttcccggatgcgtgacggaaggaatgtcagcgggcagcctgccttgcggttttgtctgtccgaatatcgcttcaatacctgccggaatgtttggctggagaaattgtccgtctgtatatcctttaaagccgtagactgcgataagggcttcagcttcttcaaagttcgcagcgtcatatggattacgcaggctcatcagcacaaagggtttttggttcgattgtgcggctttcatgacggcccgcggaaatgcagtcgtccacttgccgggatctgtgacggtatcgtcgatcacgccgtcgtttacgacaggatcatttttcacaacatatgagcctgtaatcacgtaatcagcgtcagatatctgctttttgtgttcatcatgaaatgtgcgctcggcgaagttcattttactgatggttaccggccggatttttttcttcttgatgagctgccgaatggtttgttccattgacgctgtttgatcttcatatggagcggcaatgagaacgcggctgttctttttcggtttgaatgggagcgtgcggtttttgttttgtaagacggtgacggacctttccgcgatttgtttttccgctttcaggtgatttttgctgccgacggttttctttgcttttgcaatcttctttttcagatttttctctttcggggagggatatatccctcgttttattttcagggaaatgatgcgttccgctgatttgttaatttgctgcagcggaatttcccctttttgtaccgccttttttaaagcggaatgaacccgggcaaagcggttttccgtttgcagcgatgtcacttgggccggcatcagggcaatatcgactcctgcttttacggccatgacgaccgcctcttcctggccgaaatgatcggcaatggctttcatatttaatgcatccgtgacgatgacgccgttaaagcccatttcctcacggagaagatgagtcatcacttttttcgagagtgtggcgggtacgaggatgtctgaaccgtccagcttgcttttataggttgtatcgtcaaacgcgggaaattgcacatgggctgtcatgatcatatcagctccggcctgaatggccttccggaacggataaagttcaatctgacgcagcctttcttgattgtgggtgacaagcggaaggccgtagtggctgtcgacatccgtgtcgccgtgtcccgggaaatgtttgacggcggcagcgacatcctgcttttgctgagccttcattgaggcaaggccgagtgaagctgtcagatctcggtctgaactgaacgacctgacgccgatgacagggtttccgggattattattgatatcgagaacgggtgcgaaattcgtattaatgcccagtgctttcagttctttcccgataatggcgccggtctgggacgcgtaggctgtttttctagcggctccgagcgccatattgcctgggaaatgagtgccctcaccaagtctagttacgatgccgccctcctgatcaatgcttaataatagcggaatgtcagggctcgccttttgaaaggcatctgtcaggcgtaccgtttgttcagtgttttttacattttctgaaaataagataactccgccgaaccggtacttttgaataagccctgcgacttcgtcattcatttgggtaagagcctcaggtgatgactgcccctttttttgccaattgcgaaaatcaggcatgagcatctgccctaatttttcatctaatgtcatacgggataccgcttgttccgcctgtgacggaatgtccggttttgtcgatacatgatgcgtgccgaaaacaatgaacaacagtaatacagctgagatgacaagtttcatgatggtgccctcctgccttcatagtttggacaaaagacatgggttgtcattcaatggcttcataaatcgtttttatgacgctgccgtagcttccggtcggaaaaagatccccttcaaaaacattcgggttttcaccgggactgacgacgggggaatgctttttattggttaaaagcgcgatccccagcttataagcgggatcaataatcgtgacggtgccggtccatcccgtatggccatatgcctgcctgcttgcataagggccgaacatccactccatatccgggctgccgtttttccgccagccgagagcgaaagtcggatcagaggatgccgccgttgtgaacaaatcggccgttcttttattgaagagagaaacgtgtttataactgcctccgttcagcatgacttgaagaaggacggccatatcatcagctctggaaaacagcccggcgtgaccggacaccccacccattgagtaaaatgctttttcatcgtgaacttccccctgcagcgtatacgccctgatgtgagggaaatggatgactccgtcacgtgtgttgcctaaacgttcagtagctgcgaatgctttttctttaaagcttttttgcagcgggttgaacagtgtgtgcgtcagtttcagcggtttgtacagttcttgttccgcataggtatcaagggtttttccggttatgttttcaatgatgcagccgagaagcatgtaaccgatatcgctgtatacgtgttttgttcccggtttgtatgcaagcgggatttgagtgagaaaacggatcgttttatcccgttcttgtgaatacaaagggcctgcggtgtccggctgatagaaataaaagcttgccggcagaccggattgatgctggagcacatcgatgacgcgaatgcggtctttttcttgaatcggatcgctttttctgtctttgaaatcaggaaggtaagccgagactttttgatacacatcaagctttccctggctgacgagtcgctgtaatgcaaaattcgccgcgtacatttttgtattggaagctagatcaaacatggttgatgttttcatttttttcggacgggataaaagggtgttcccgtcatattttttgctgtagccgtatgctttctttttgatcacccgtccgtcctttacgacgacgaggacggctccggggaatcctgctgcgatgtctttttcaatcatttgatcaacctttctgagctttgctgcgtcgtataatttggcttgggcttcggctttgtgctgcggcagaaaagagaggctgatgaccattgtgagtatggcggctgtcagtgttttcatattctgatccctcccggtttattcaaattcagcagccatgtcatccttaaatccgaacgcataagtgaagacaaagcccgccgcgtaagagatgaagagaccgatgatatacaaaacgatttgagccggctgtacgagaaacgagagcggaaggccggagacaccgattgaaaaagtagccacctgaaaatgggcttgaaaggcgccgccgattcccgcccctaaacacgccgtcaaaaacggccggccgagcgggagcgtgacgccgaagatgagcggctctccgattccgagcagaccggatggaagtccgccgccgatagctcttttcaatgaggctttttttgttttcataaagatggcgaaggccgcccctacctgacccgcgcctcccatcgcgagaatcggaagaagcgggtcatctccgattgatcggattaattccaaatgtacgggagtcaagccctgatgcaggccggtgacgacaagcggcaggaaggcggctcccagtacaaaccctgagagcactcccccgacattcagcagcgacaataaacctgatgtaatgagatcagaaataaaaccgcctgcagggataaaaacgacatatgtcaccagcccggtgataagtaaagacaatgtaggcgtgacgataatgtcgatggattgatggacgtactttctgataaaccgttcggtataagcgataaaaaccgcagcgaaaagaacgccgattaatcctcccctgccagggagcagattctctccgaacaaactgatattggcgatctcagggttaaggatcaatatacccgcaaggccgcccatcgcgggagtcccgccgaattccttcgccgcattgatgccgacaaggacgccgaggtatgcgaataagcctgaaccgataaccgttaaaataagtgcgatttgggattctttcgggagccagccggcctgaatgacggctttcgtaataccggtgattaaacctgatgcaatgagtgcgggaataaggggaatgaagatgcttgatatttttcttagaaacagtgtgatgggtgtggtgttttttctgttgagatcggcttttttccgtgaggcggcttcttttaaatcaatgttttttccggatgacataagttttgcgaaagcgtcggcgacatgattgacgacacccgtgccgagaatgatctgcagtgtttcggcttcgacgacgcctattaccccgtccagccgtttcagcgcttcaatatccgttttgtcctgatctaaaggtgtaatcctcaggcgtgtcatacagtgggtaaagcctgaaatattcgatgaaccgccgcaattgtccaggatatctttggccagtgactgataaaatgcctctttgctcatggagatcctcctttgtccgtacgatttttcccagggagctgtgcctgaaacgagtctaaaagcgcctgcgccgatcatgaaaacggcgcgggctcgtaaaagcacattatttttcaccaaagaacgatcagcgttctttttcttttgaaacgtgctgttcaatggctttgtcaatgaagccttctgcttctttgagcagtgccttcgcgtgtgtttcatccgaattcgtcttcagcatgacgattgccgttttgacatggctgcctgcggcctcaagcgtttcttttgccttgtcgtacggaacgcccgtgatgctttggataatgccgattgcgcgttctttcaatttttcgttgctgacatgaacgtccaccattaaattttcgtacactttgccgcttttgatcatcacggccgtggaaatcatgttcagaatcattttatgtgccgtcgccgctttcattcgtgttgaccctgtaatcacttcggggccgacgacgacttcaatgctgtgatcggcataagtgctgatcaatgagtgtttattgcatgtgagcgcgacagttttggcgccgattgtttttgcgtatttcagcgcaccggccgcatacggcgtgcgcccgcttgccgcgatggcgatcacggtgtcttctgcggtaagcccgatcgttttgagatcgagagcgccggtttcctcgctgtcttctataccttcagccgcttgcaaaaaggcgtctgctcctccggccatcagaccgatgacagtgtcgggacttacgctgtatgtaggcgggcattcaaccgcatccagtacaccgagtctgccgcttgtgcccgctcccgcataaatcagcctgccgtttcgccgtaaggactgatgggcgaattgaacggcaatctgaatatcgggcagcacctgctgaacggcttcagccactttgaaatcctcttggttaatgatgcggagaatttccatcgtgtctgcttgatggattgaagcggtctgcggatttctggtttctgtggtcaatctgtgaatgttaagccggtctgtcatgattgtaccctcccaagtcgttaatacttgaagtatatgggcttctgaatagatgtttcaagaaaaatcggcagggatgagatggataatcaagcgctttcacaaaaaatgatgcagaatgtgctgttcgccgatggggccgatcctgcgacgacctttatcaataaaaccggaagaccggtacaggttctttgcacgatgattgcgatggtttacagcaagcacgatttcatcacaccaaggaaagtaatttgcgacaaaagcggggagctgcagcatcgcttgtttggcataaccttttccctgatgcggcgcatgtaaggacagcgcactcagcaaaatggcagacacattgttcgaatatggggcaatggtttcttttgaggtatgtaaaataaaaaaaccgacggggcggtcttcttttaaaatgactgtcgggtagcgatcccggatgacaagagcctgcggcagtacatccttcgggagagctgtgaactttttatcttcttcactcagcacaaacccgttcagcccgtctgcatgctccggtttataaaaggacagggctacatccatgatatctactctccttttttataattgatccaattcatcttctgatagaacacggcagcctgcccgttttaaaagagcggaagtgatgccgtctccgattattttttttcctgagaaagtgccgtcatagataaagctgctgccgcaggacggactgttttctttaaggatgaccgtggcggcgcctatttcttttgcgtatgctaatgttttttccgcgccgtccatatataaagccgtaacgtcttcgcctgatgccgttacgattcttgctgttccgttcagcacgtcttcgcccgtgccgccgatgatttccgccggttcgcggggagtggtgaagccgcccaaaagttcggggcagaccataacagctttcttttcttctacgagtctgcggattttttccgaagcggcgtgagagccgttatacctgcattcgataccgccgagacaagagctgactaagatcatctgtgtccattcccttcaatattttgatactttcatcataaatgaaataagagaggagggatgagtttttcagttaaaaaacgggtaaaaaagtttgaaaataaaaaaaataattttcctctttacaaatggggtacaacctgtatataataacttttgtcagctcgacgcggacacaacggcccgttggtcaagcggttaagacaccgccctttcacggcggtaacacgggttcgaatcccgtacgggtcatatggaggattagctcagctgggagagcatctgccttacaagcagagggtcggcggttcgagcccgtcatcctccaccatatttgccggcctagctcaattggtagagcaactgacttgtaatcagtaggttgggggttcaagtcctctggccggcactgtttttcaaaaaaatacggaggggtagcgaagtggctaaacgcggcggactgtaaatccgctccctcagggttcggcagttcgaatctgcccccctccaccatttttgggctatagccaagcggtaaggcaacggactttgactccgtcatgcgttggttcgaatccagctagcccagtctcagacaccttttgcataaaggtgtcttttttttatcagcattttgtttcgatttctgattgttcatcagatatactatttttaagctgctgttaaggcagtatattctgtattttccatctacaccctgcctgaaatttggtaaaataaatgtaataaaaaaaatgaaaccttttaaaacaatcaacgtatagatacagaccggtgaagggcagaggtaagataaaacatggaaaacctgattaaaaaaagaatcaagcaagtcaaaaaaggcgatcaaaatgcgtttgcagaaatcgttgacctttataaagataagatttaccagctttgctaccgcatgctcggcaatgttcacgaagcggaagatattgcgcaggaagcttttatcagagcgtatgtcaatatcgacagtttcgatatcaacagaaagttttcaacgtggctttacagaattgcgaccaacctgaccattgaccgcatccgcaagaaaaagcctgattactatctggacgcagaagtagcgggagcagaagggctgacgatgtattcgcagatcgccgcggacggggttctccctgaagacgccgtattgtcattggagctgtcggacacaattcagaaaaagattttaaagctgcctgacaagtacagaacggttattgtattaaagtatattgacgaactctctttaattgaaatcggggagattctgaatatccctgtcggcaccgtcaagacaaggatacacagaggcagagaggctcttagaaaacaattgagggatctttaagtggggtgatgaaatgagctgtcctgaacagatcgtgcagcttatgcataagcatcttgatggagatatccttcctgaagatgaaaacgtattaaaacaacatttgcagtcatgcgggaattgcaaacggcattttcatgaaatggagaaatccgtagcactcgtccgaagcacatcgcatgtcacggcccctgctgattttactgccaaagttatggcgaatcttccaaaagagaaaaaacgcgcttctgtaaaacgatggatcaaaacgcatccgatgattgcagccgcagcggtttttgtgattttaatgggcggcggttttttcaacagctggcataatgaccacaatttcagtgtgtccaaacagccgaaccttgtcgtgcagaatcacacggtcaccgtccctgaaggcgagaccgtaaagggcgatgtcacagtaaaaaacggcaagctgttcattgaaggaaaagtcgacggcaatgtgaccgtcgtcaacggagaaaaatacatggcctcagccggacaagtcaccgggcagattgaagagattaaccaattgtttgactgggtctggtacgaactgaaatcggcgggccagggcgtcgtgagcgctttggacccgagtgaagatgagtaaagcgtataatcgctttactctttttttgtgcatcgccgctctggctcatttcacttgagaaatcaaaatgtggtataatgagcacgctatatgatgtacatattgctcatgcagcacaattcataacagaaaaacgaaatgactgaattcttggaggacgaggaaatggcttttgaggacatcccatttttgcaatacctcggcaatgccgttgatattctccttgtttggtatgtgatatataaattaatcatggtcatacgcgggacgaaggcggttcagcttttaaaaggaatcgtcgtcatcgtattggtccggatggccagttcatatttgggactcagcacgcttcagtggctgatggaccaagcgataacatggggatttttagcgatcatcattatattccagcctgagctgagacgggcgcttgaacagctcggacggggccggttcttttccaggagcggaacccccgtggaggaagcgcagcataagacaattgaagcgattacaaaatcgatcagctacatggcgaaacgccgcatcggcgcactcatcgcgattgagcgcgatacgggaatgggcgattatattgagacgggcatcccgcttaatgcgcaggtcagctcggagcttttgattaatatcttcatcccgaatacaccgctgcatgatggagcggtcattatgaaaaataacgagattgcggcggctgcctgttatctgccgctttctgaaagcccgtttatttcaaaggagctggggacgcgtcacagagcggctgtcggcatcagtgaagtgacggacagcttaaccattattgtatctgaagagacgggcgccatcagtgtggccaaaaacggagaccttcacagagaattgacggaagaagcactgaaagaaatgcttgaagccgagtttaagaaaaacgccagagatacttcttctaaccgctggtactggaggggcaagaaaaatggataaattcttaaacaaccgctgggctgtaaagatcattgcattgctctttgcgctgctgctttacgttgcggttaacaacaaccaggcgccgactccgaaaaagccgggggaatccttttttccgacatcaacgactgacgaggctacgcttactgatattcctgtaaaagcatactatgatgaagcgaactatgtcgtcaccggcgtgccccagaccgtaaatgtcacgattaaaggctcgacaagcgcggtgaaaaaggcgagacagacaaagaattttgagatatacgccgatatgaataagctgaagaccgggactcataaggtcgaattgaaggcgaaaaacgtatcggacggactgacgatctccattaacccgtcagtcacgacggttacgattcaggaaaaaacggctgagagttttcccgtggaagttgaatactacaataaaagcaaaatgaaaaagggatacacccctcagcagccgattatcagcccgaaaaacgtgcagattacaggttcgaaaaatgtgattgataacatttcacttgtcaaagcatccgtgaacctagaaaatgcaaatgagaccattgaaaaggaagtgaaggtgaccgtctatgacaaagacggcaacgcacttcctgttgatgttgaaccgtcagtcattaaagtgacggttcccgtagccagtccgagcaaaaagcttcctttcaaaatcgaaaggaagggaagtcttccggacggggtgagcgttgcgagcattgactcgaatccgagtgaggtgacggtttacggtccgcaggatgtgctggattcacttgaatttattgacggcgtatctcttgatttaggcaaaattgataaagataccgatatcaatgccgatatcccgcttcctaagggtgtcaccaaggtatcaccggaaaaaatcacgcttcatattaaagtggacagtgaagacaaaaaggattttgacaatgtcggaatcaagacggtcggactgggaggctcacagcagattgagtttctcgatcctgaatcgcaggcgataaatattacggccaaaggctctcccgccaacattaaggcgctgaaaaagtcggacattgaactgtatgccaatgtctcggacttggatgacggagagcactctgtaaagctagaagtaaacggcccgcaaaacgtcacatggtccctgtctaaagacacggttaagatcaagctgacttctaagaaaaacacaagttcaaataaaaatgacggcggctccgctgattccggcaataagaacggcacaagcggagacgcagacaaagacaaaaacaagaaccgggaagacgatactgacagcgatcagaataaaagtcaaaaccaggatcaaaatcaagaccaggatgaagacggatcaagcgctgattcttcttcaacagaatgaaaaaggagcgatacaaaatgggcaagtattttggaacagatggtgtaagaggtgttgccaacagcgagcttacgccagagctggcctttaaagttgggcgttttggcggttatgtcctgaccaaagataagcagcgcccgaaagtgctgatcggccgtgatacacgtatctccggacatatgctggagggagcccttgtcgccggacttttatcgatcggagctgaagtgatgcgcctcggcgttatttctacgccgggggtatcctatttaacgaaagccatggatgctgaggcgggcgtcatgatctccgcttctcacaaccccgtacaggataacggaattaaatttttcggaggggacggctttaagctttctgatgagcaggaggccgagattgaacgtctcatggatgaaccggaagataagctgccgagaccgacaggcgcggacctcgggcttgtaaacgattattttgaaggcgttcaaaagtatctgcaatttttaaagcagacggcggacgaagatttcacaggcattcatgtagcgcttgactgcgcccatggtgcgacatcatccattgcgacgcacctttttgccgatcttgatgctgacgtgtctacaatggggacgtctccgaacggattaaacattaatgatggcgtcgggtctacacacccggaagcgctgagtgctttcgtcaaagaaaaaaacgccgatatcggccttgcgtttgacggagacggcgaccgcctcattgctgttgatgaaaaaggaaacatcgtcgacggtgatcagatcatgtacatatgcgcgaagtatttgaaatcagagggccgtctgaaggatgataccgtcgtatcgactgtgatgagcaacctcggtttttacaaagcgcttgaaaaagaagaaatcaaaagcgttcaaacggcagtcggcgaccgctatgtcgtagaagcgatgaaaaaagacggctataatgtcggcggcgagcagtcagggcaccttattttccttgattacaacactaccggcgacggtcttttgtccgcgatcatgcttgtgaatacgctgaaggcgtccggcaaaaccctttcagaacttgcggatgaaatgaaaaaattcccgcagctcttagtgaacgtgaaagtgacggataaatataaggtagaagaaaacgctaaggtgaaggccgttatttctgaagtggaaaaagaaatgaacggagacggccggattttagtgcgcccgtcaggcaccgaaccgctcgtccgagtgatggccgaagcgagaacaaaagagctttgtgacgaatatgtcacaaaaatcgtggatgtcgtgcggacagaaatgggagcggagtagcgaagtttataagcagagagcgaacaagacaagtgcgatcagcataatatgatagtaaacatgatgccggggcggcaaaaaataattgaccgtccttggcacatgctgtaaaatcaagcttgttcagcctttgtttttcacttgcaggaaaggcgggattgtttgcatcttttataattacagcgcccgaactaagcgcccgaaaaacggcttagttgacgaggatgggggttatcgaattttcggcggatgcctcccggctgattcatttagatcacagccgtaaggatttcttcaaaccggaggggcgactctccgaacaaagagaaatcacatgatcttccaaaaaaacatgtgggaggggacgattgaaagtccccttgtaatttgactttcttcgtctccttttgcacctttaggaggaagaaaaaatgtgtggaattgtaggttatatcggtcagcttgatgcgaaagagattttgttaaaaggattagagaagcttgagtaccgcggttatgactctgccggtatcgctgtggcgaatgagcagggcgtgcatgtgtacaaagaaaaaggccgcatcgccgaccttcgtgaagtggtggatcacacggttgaatctcaagcgggaatcggccatacacgctgggcgactcacggcgaaccaagcttcctgaacgctcacccgcatcaaagcgcactcggccgctttacacttgttcacaacggtgtgatcgagaactatgttcagctgaagcgcgaatatcttgaaaacgttgaactgaaaagcgacacggacactgaagtagtcgttcaaatgatcgagcaatttgtggcgggaggacttagcacagaagaagcgttccgcaaaacactgactctgttaaaaggctcttacgcaattgcattatttgacggtgaaaacacagacaccatttacgttgcaaaaaacaaaagccctctgttaatcggccttggagatacgtttaacgtcgtggcatctgacgcgatggctatgcttcaagtaacgaatgaatacgttgagcttttggacaaagaaatggtgatcgtgacaaaagacgaagccgtgattaaaaaccttgacggtgaagtcatgacacgtgcgtcttatatcgctgagcttgacgccagtgatatcgaaaaaggcacataccctcactacatgttaaaagaaacggatgagcagccgcttgttatgcgcaaaatcatccaaacgtatcaggacgaaaacggcagactggccgtggccggcgatgtcgctgacgccgtggcggaagcggaccgcatttatatcgtggcttgcggaacgagctaccatgccggtcttgtcgggaaacaatatattgaaatgtgggcaaacgtaccggttgaagtgcatgtagcgagtgaattctcttacaacatgccgcttctgtctaagaagccgctctttatcttcctttctcaaagcggagaaacagcggacagccgcgccgtgcttgttcaagtcaaagcgctgggtcacaaagcgctgacgatcacaaacgttccgggatcaacgctttcccgtgaagcggattacacattgcttctgcacgcaggccctgagatcgcggttgcatcaacaaaagcgtatacggctcagattgccgtcctcgcgatccttgcatccgttgcagcagaacgtaacggcgttgatatcggttttgatttagtcaaagaattaggtatcgcggcaaacgccatggaagccctctgcgaccagaaggacgaaatggaaatgatcgcgcgtgagtacctgactgtttcaagaaacgctttcttcatcggccgcggccttgactacttcgtgtgtgtcgaaggcgccctgaagctgaaagagatttcttacatccaggcggaaggcttcgccggcggcgagctgaagcacggaacaatcgctctgattgaagaaggaacaccggtctttgcactggcgacacaagaacacgtcaacctgagcatccgcggaaacgtgaaggaagtcgcagcccgcggcgccaacacttgcatcatctcgctgaaaggcttagaagacgcagacgacagattcatcctgccggaagtcaaccctgcgcttgctccgctggtatctgttgtgccattgcagctgatcgcttactacgctgcactgcaccgcggctgtgacgttgataaaccgcgcaaccttgcgaagagtgtgactgtggagtaatatatttaacccctttggttattagccagaggggttttttaatgcggaaatgagaaatacatactctttgcgattgtaaagaaatccccttttatatattgaaaaggattaacacctgctttataatacgagatgcattccggttaaaatccataaatgtaatcattagtaaatcatttttgtgcatgcctcatcagaaagtaatcaccttcagcagttttcatcatgaatatcccattatataaatgtaatcaatcgattacacatccacattatgcttaagactttaaaatccctgttgtatttgccgactcctgatccattatgaatactcgactagatataaaaataacaacatttttgcaataatccagttcaattctcaaaaaaagtcctgacaacaatgataggagtggaatgatgtcaaaccttttagaaatcagaaacatcagcaaatcttttggccataaagctgttttaaggaatgttacattcaatgtgcctgccggatcaattgtcggttttatcggtgataacggcgcaggcaagtcaacaacatttaaaacgatattaggattaatctctcaggatagaggtaaagtgaaaatctttggtaaagagaatttggataaacatataaaattcaaagaagatattggggtcgtatttgatgcgatgaatcttcctgcgcaccttacgataaagcagctgaatcatgtatttaagtaactattcgacgcttgggaccaagatcatttttaccggttggttcattctttctctttacctatggacaaaaaagtgaatacattctcgcgcggtatgtcaatgaagttatccgtagctgttgctttgtcgcataatgcaaaattattacttttggatgaagcaacgggagggcttgatccctcttcaagagatgacctgttaaatgaattaaaaagctttgtgagtaaaagcaacggcggtattttactttcatcgcacattatgactgatgtcgagaagatagccagccatatcattattatgaaagatggcgaaattttattaaatgaagagaaagataaggttcttgaaagctatactgttatagacgttgatgaaggccaattggctgagcttgacgaagatatcgttctagcaaaaaggaaacatggatcttattggagtgtgcttgtatcggatcaacagaaattgccgaatggcgtaacggccaacaccatttccatagaagaaatcagcgtctttttaacgaggagtgaaaacattgagaggtctgttactgactaactattacctggtttatcgaagtttctttgcatacacggggttggccatattggtatcagcagtcattttttattttggggatgcttcaatgcatcgttttgttgctatgctgattattttgtttgtcgtcatgcccgcacttgaggttataaagtatgagagcaagtctggctatgacaggtatgtcctgactttaccggtcagcagaacaaatattgttcaaagtcactatttcttttatcttttgattgttgtgatcggagccgtactatcttatggtgttttctttgtatacagcctgggatctgatgaaccgattgacagcatatttaatattgtctcttttggaacgttcatcgttctctttgccggtgcaatcgtttatcctcttctctacatgataggcccggaaaaatccgatgctatcgtgattggaggtgcaatggggggactttttgctacctttggattgcaaagtgtcgttgggtatgtagcagaacaattatcgccgtcatttttgcacataaatccttctttatatgttccggttatatatctcatgatcggcgttatcttatatatcatttcatttttcattgccgcagctatatatcataaaaaagaattttagcaactgatcaagttacaacaggataaggtgttgtctttgcatataaagaactttgtgaccttgagggttaatatttagcatataaaaaaaagggctttaatggaaggcaacatgctatatcatcaatatctgagagcaaattccgagtatttcggaaaacaagagatggcaatgaatatgaaggcgttattccaatcggtaagcctataagcaattcaagtgcttatatagtggatcgatatggaaacttactcccgataggcatctatggtgaactatatttaggcggagatggcgtggcaagaggctatttaaatcagcctgaattaaccaaggagaaatttatacaaagcccgttcttcgggggaaattatataaaagcggagacatcgccaggtggcgcagagacggtaacattgaatttgccggcagagcggatcatcaagtctagattcggggattcagaatagagacagaagaaattgatcgaaaattattgagccattcaagcattaaagaggctttggtgttagccaaagaaaataaacagagtcagtcaacttattcagacaatttgtataaaaatatagtcgaaggagcaaaaaaggaaccaatgttccaagagtatcttgaaactgagtactttagagaaaaagtaattgataaaataaaagcctatactcgatttttaaacagcattacacataaacacaaaattgctgcaaatcttcatcttattaaggcagcaggaaataaagagaaaaaagataatgatcaattccttttatataattggggagactttactgagagagcagtgcattattataatggattcggggaacatggtgaaatgctttcaaaggattatttatcaggaaatacggcattaattactgatatattaaaaaaaacagaagaacattcattaccttataaaggaatgtaacatttaacacaggagggaattgattttttcttccttcctgttttatttttaaataatccttgagagaatggtgaactatttttataagaaggtgagaaaatggataatatatataaattgctgattatagaagacgataaggatatggctaaggcgttacaaaatttacttgttaaatggaattttgagaccgttatatgcggagattttgataatattttgtcaatatatgaaaaagaagaacctcacatcatattattggacatcaatattccttcatttgatggtttttattggtgtaagaaaataagagaagtttcaagtgtcccaattattttttgctcttctagaaacagtaatatggatattgtcatggctattaacaatggcggggatgattatattcaaaaaccatttgacagccatgtattggtggcgaaattacaagcaattataagaagaacttatgagtacataacagcagaatctcatctaatcgaatctaataatgtgatattaaaccttaacgatgcaaaaatatatttccaagatcagagtttagagcttacaaagaatgaatttaaaattctaaaaacgttaatggaaaacaagggaaaagttgtttcacgggataatttaatgagacagctttggaatgatgatatttacgtaaatgaaaatacgttgacagtaaatataaatagattaaggaatagattagaggggattaatgttgatgacttcattttaacaaaaaaaggaatgggatatataattcaatgaaattaattgattatgtgaaaaaccatatattatggattttatgcagtgcacttattctggttgtaatcaatgggattttgtttgcgagtacctctattcatcaaagttatatagacattttttatatggatttgttgattgtctttattctactgatcaatattttctatggattcgtcaaggcaaaaaagaaatacgaagttgtgtttaatagttctatcgaaactttagaaaaaaacaaagttagaaatgattattttatagatatgcttataaaagtctccaaaaagcaacaaaataaatttttgaaagcagaagaagattataaaaacggtattaacgaaattcaagactatactactcaatgggttcatgacataaaagttaatatagctgtgtgtgaactgctactggatgagatcaactcagaaagcagcagagagctgcgtaatcaaattgaacaaattaaatttaggattaatcacattttacatgtgacaagagctaatcactacgatcaagacattttagcgggagtagtagatgtatgtcatattttaagaagtgcaataaaagaaaatgctcttttttttattaataaaaacattgagattgagactaatttaaaaccatttagtgttatcagtgatgaacgttggatctattatatttttggtcaaattcttaataatagcagtaaatatacacctgaggggggaacgctgactattacaactaaagaagagaaacaagcctattatataatgattaaagataatggaattggcatttcaaaagaggatttatctaggatattcaataaaggctttacaggtaaaaatggtaaggtaggaacgaaatctacagggatgggtttatattatgctaaaaaaatggctgataaactaagtataggaattgaggtagacagcgtagagggtgaatatactgaatttcacattatattttataaactatccgattactataaagtggaaaatgaggcaataaataattagttaaaaacagggggtaatctaatgagaagaaaagctaaaatattttgtattccatttgcagtgggtcatcgatagtttattctaagtggaaaaaattcatggatccacttggaggtaaatgaagtagagttggctggcaggggaagaagattgaatggccctcaatagacaatatggaagaaatggttgaggatatataattattaagaataatataactgaaccttttgctattttcgaacatagtatgggtggactgcttacatatgagctttgtcacaaatttcaaaatgaaggaaatcctgccctcgtgcatatttgtctccgtagaaaagctcctcaattgaagggaagaaaacgactaatacacatcttcccaaaacatgaatttatttctgatatcttaaaattagatggtacaggtaatttattttaagaacaaggagttagaagatattttcttgccgattttgagaactgagtttaagtcaatagaaacctatgaatttaatcctaaaaacaatttaccgaattcttttttatggagtggacgataagactgttgattttgaagaattatttttttgggagaaaagtaacccgaaagagatattaaattttcgtattaataagatgatatttcttataaatgaatataccgaacaagtagtaaaaaaatgaatgagacgttaaatacattaaaaaataatgaatcagaacgtaacagtgtttagttattatgagttgattaaggaaggtttatgacctgtgggttcctctaatttatttaaccttggaaacatagttcatgtttactttggaaatgattaaagtcgcaaattcgttgggtaaaattctgtctgcatttttattagtatattttgaaaaataggaacaaacagactaatcacttagtaagtaaatctaattggggatataaggtaaaaatcaaaccgccttttataaggagcggtgccgctccttatatctgcttaaaaacctcacatgctgaatatccatggttttgtacaaaagtcctctaacccatcaccccaccctaacatgaatgtcacattcacttttagaaatgtaacctaaatcgatagcagcgttttttgctctaaattataatacaactataagaatcaatgtcctacacatgatcagattttatgggggtttatagatgaataagatcgtagaggtatcaaatgtaataaaggagtatggtgaaattggcagtacctttcgagcgcttaaagaggtaagcttaaatatcaacaaaggtgaatttgttgggataatgggcccttcaggctcaggtaagacaacattgttaaatattatgtccactattgacaaagctactttaggagaagttttaatcgatggtaaaagaatagatgattacaaggatgaggaccttgcaaaattcaggagagacacaatcggatttgtcttccaagcttttaatttattagacaatatgacaattagagataacattgctctgcctcttgcactaaacaatgtaaaacacaaaatcatcctaaaaaaaattgatgaactaactgagctcttaggaatttcaaatcagttagataagtatccatatgaattgtcaggcggtcaaaagcaaagagtagctatttgtcgtgcgttaattacctctccaaaggttatttttgcagacgaaccaacaggggcccttgactctaagtcatcctcagaggttctagaatgttttaaaaatattaacaaaaccataggaacaaccatcattatggtaacccatgatgcaaacgcagcaagttattgtaatagggttatgttcttaaaggacggtaaattacacggaagactagacagcagcggagataaaaaggaattatttaagaaagtgttaaacatgcttgccgtaatgggaggatcggaaaatgaactcctttaaaattgcgtttaagcttttgaagaacaatttaaaaatatatggattatattttgtggttttagttgtaactgtggcaacttactacaattttactgctatacagtacaatgaagtgtttgtccaattaactgaaagatttcaatcagctgtagtggcaagtgcaacatctggctttgttctaatttgcacagtggtcttttttatgtggcatgccaatggattctttttaaagcaacgtcaaaaagaaaccgggttatacatgctaatgggaataagtacgtctaaaattggaagagtattcgcaattgaaagtattctaataggcagtttgtctctattaatgggtttattgatcgggatattattctcgaaattgttcttaatgttattaagtaagtccatgacactgggtggtgaaattccttttagtatatctgcacaagccatcattcagcttattattgtgttcgggatcatctttgtaatgctgggaatgaaaaactatagagttgtgaaaaaaacacaactaattaatatgttgaatgcttcgaaagcaaagccctcacctccaaaatataattatataaagggttttacaggtttagtattaattgctgcaggctatatagttgcactaaactttaagcaatgggatttggatttattgctttctgcgatgggaatcttgatcttggtcagcacggggacttatctgttttttggaagttctctgactataattttagggaagttaacaaattcaaaaaaaattatttataaagatgtaaggttagtcagtataagcaatacattctttagacaaaaagttaattatagaagtttagcgatgacggctattttaacagcagctaccgtaactgcattcaatgtaagcatttcgttcaaacagtttgaagcaaattatgacatcacagcctccccatacagtttaagttttgaaagcaattctgaagatgtcaaagataaagtcaaagaagtgatccgagagtcaaagcatgacttaatcggaatcaataagattcacttttttattggtaatgtccaatacgacgataataagcaaaatattgatccgaataacaaaggtattatcactagttactcacaaataaagaaaacattaatatttttggattatagtaataaagcaagtattttgaatcaaattaaaccagaaattcatgaaatttcttttattctaaatgctgattcgatagcttcacctatttatgttgatggtaataaagtgagcattaataataataatttcctagtttctaaacatacacagctcccttttacagggaaaattaaaaaatatggtgacaaaaacatttatgttttaaatgacaatgattataaagaattaagaaagaaaaaccaagagattgtattaaatggtgtgcgaattacagatgaaaaagaaagtagggaagtggttaatagaatcaaggaagttgtaccaggtggagattggaatgtaaatggaaagaatcaaagctttacatgggagtattatgctttaggtcaatttttctttttaggcctgattatgtccctagtattcatactagcgacctttagtacaatttactttaaaattttaagtgatgcattcactgatagggaacaatattcaatgttgaaaaaaattggtatgagtaaaaaggaagtgcagaggtctgtctatctgcaagttggaattgcatttttactgcctgtgattgtgggagcccttcatagcattgtagcaatgaatatgctggaacagattatgaatgtaaaattcaccattctaattctatgcggcatcggattatttgttcttataatggttgctttttatataggactctgtaaaaactataccaaattggtatacgaagagcagtaaaaaaatgagaagaattgtccagtaaatttataaagagagagaagatctcatatgtcatggttaactaaatggtcctttgctaataaagctgctattacgttaacatccattattataatagcctggggagtagtcagttatcttcgtatattagtgaagaaatcagagtcggtcaatcttgtctcacaaagcttagcagttgttgttattggaggtttggcagtagcaaccatgcttaccttaatagtgataccatgcgtatatgaaatatttaattttaaaaaatcaaaaatgcaaaggcgtgaaaaaacattgaaagatgatataacaatttaaataaatttattgatgtttttgggacagggaacagaacacttttcgaagtcagctgtcggtatatgaccggcggctggttatttagttagacgtctataaagaagcgctgcagcaagatcctttgttgagacatacggcggcagaagcggccgcccattacggacaggggctcacgaagcttgcgagaacgggttatgatgcaattcctgatttggttctgtccattgagtataaaaacggatctctgcgtgatgtcggccaaagcaggcaatacggatttggggatacagattggctttctgaatggaaacgggagctgggtgtgcgtatataaaatgagaaaaaagctgacaaatgatgccgtcagcttttctttatgcgtttacttaaaactcctcatactccgccgggtcttggccgtttatgcgtccgtcggggcgggtaagcgagtcgataatgctcatgtcgttttcatcaagagagaaatcaaaaatggagatgttttcaagctggcgctcgggcgatgttgattttggaatcgggatggcgcccagctggatatgccagcgtaaaatgacttgagaaatggttttgccgtatttgtccgcaatccgtccgagtttttgatcgttcaatacttcgccggcgcgggataacggactccatgattctgtcacgatgctctgttcttcgtgccattggcgctgctgctgctgattaaaagcgggatgcagttcaatttggttgatgcctggctttacgccggtttcacgttcgagccgttcgatatgctcaggcaggaaattgcagacgccgatggatcggatcaggccccattcttttgcatcaatcagtgcctgccatgcttccgtgtagcggtcttgtttcggattcggccaatggacgagatacaggtcatagtagtccagaccggcgcggtataaagattcttggatggtttgtacagctttgtcatagtcatggtagcgcccgggcagcttggacgtcacgtatagctgttctctcggaacagagcttctcttgatggcttctccgaccgatccttcattttcatagttataagcggtgtcaatcagacggtagccgatatcaatggcgctggtaatggcatgaacgccgttgtttccattaagagcgtatgtaccgaagccgatcgcgggaatgcttgtcccatccagcagtttcttttgcggaattgctccagtcatcattaaatccctccttgttttctactttaccattatttttacaaatgaaacataataatggaaggaaatgagatgagccgcacatgaaaaaagctgacggagaaccgtcagctttaaatttgaaacatccatgctacgacggggccgaagaccgaccctaacacggcgcagagcgtcatggaaacagagctcatggagaccgttaattctccgtactccattgcttttgaggtgccgagcgcatgggaagcgctcccgaatgcaattcctttcccgagtgagctgcgaatgcggatccacttgagaagcagcggtcctaagataacgccggaaaaccctgcgatcatgacgaacacgactgtcatggaagggacaccgccgataccggacgcaatctgtatggcgacaggcgtcgtaattgattttgggataattgacaaaatcaaactccggctgatgccgaacagctctgcaaatagcaggccgctgaccattccggagaataaaccggccaacacgccgccgatgatcggaaacatatacttgattaacacccggcgctgcttataaagcgggtatgccaaagccaccacggcggggccgagcagtgaattgatccattgtccgccgatcatatagtctttatacgaaatatgaaaaacaagcagcacggcgataatgaaaatcgtagtcgtcaaaaccggtatgagaaagggatatggaaagcgtacatataatttcaccatagccagataggcggcggccgtgaacaaaattataaggattgcgatacatgcttgctgcacttctttttctcctttctctgattggctttgtgctctaacagctggctggcgtaccctgcggcgatcattgtgacgatggtgctcagcacgatgatcagaaacagagcagccccgctggcggaaaacagtgacgggtaattgatgacgcccgtcatggccggaatgaataacagcggaagaaaagacagcaaaaatccggctccgtcttcaatcattttgacgggaatgatcttaaccgataaacatatgatcagcaggatcaaaccgatgatacttccgggaatgggcaggtgaaagaactgctgaacggctcccccgataaaggaaaatgcgaataaaataatgatttgcaagatgatgcgtatgactttcacgacaatgctgttctttggagaagagcagcttccccctttcttgatgcttcgatatgtttctttactttttgcgcatatatttgtactatacaaatatatgtatgcaaaatctttctatatgttttcttagtaaatgtgcatatgtttgtattatacaactaatattgctgttgtcaattgtaaggagtgaggctgtttgtcaaaacaagatccgattgaattaattgaatatgagctcaccacttttatcaggagagctgtttatcttgataactccgaccgtaaaatcggacatctggaaagggctgcgtatttgttattacggcagctggatgaattcggaccggcgcgtgtaaaggaattagccgaatcttttaagctggatatttccacattgtcacgccaggccgcggccttggagtcgaaagagctgatccagcgtttttccgatccttctgacgggcgggtcagtctgtttgcgattacgaagcttggcaaacagaggttaaaaactgataaaaagatgcgtcttgatcgataccgacatatgcttgacgattggtcaggcgatgaaaaagaaaagttcggccggcttttgctgcggctgaatgaggcatttatcgattaatgcatgattttgccggttaagcaggattatggcgtatacaagggagaatggaagagagtaagactttacgccattctgcttagcaaaaataatattgaataggggggcggaacatgtttctccagggacatcctgtttctcggaggctgcggcatttattatctcaatattcataattcaataataatgaaagcgctttatttttagtttgtcggtttagggtgcagggtgtttacctgaaaaaaacaattgtattttccacggaaatttattatgatgaaataaggaaattggagattatacaacaatagaaaaatagaatatttctaatattgcgggaaatgaagagtgagttaggttcaacaggtgcaccttctgcttcattatttcacatatatcagagctgttaagaggaggaagcgaagtggcaaacaaagaattaaagagaggcttaggcgcgcgtcatatacagatgattgcgctgggcggcacgatcggtgtcggtttattcatgggatcatccagcacgatcggatggactgggccgtctgtcctgctggcttatgcgatctcgggtatctttatcttttttatcatgcgtgcgatgggcgaaatgctctatgtagagccgagtacagggtcgtttgcgacattcggccataagtatatacatccgttagccggctatatgacggcgtggagcaactggtttcaatgggtgatcgtcgggatgtctgaaattatcgccgtcggttcgtatatgaaatattggtttcctgatctgccggcatggattcccggcattatcgccatggccattctcggtgcggcgaatttaatttcggtaaaatctttcggtgagtttgaattttggtttgccatgatcaaaatcgtcaccattattctgatgattgtggccggaatcggaattattttcttcggtttcggtaacggagggcatgcgatcggattatctaatttatggtcgcacggcggtttctttacgaatggtttttcaggatttttctttgccttgtctttggtcgttgcggcctatcaaggggtcgaactgatcgggattacggcaggggaagcgaaggacccgcaaaaaacgctgcgaagcgcgattcagagtattatttggcggattttaattttctacatcggtgcgattttcgtaatcgttaccgtatatccgtggaatgagcttcactcactcggcagtccgtttgtttcgacatttgcgaaagtcgggattacggcggcggccggtttgattaactttgttgtgattaccgctgcgatgtccggatgcaacagcgggatattcagtgcgggacgcatgctttacacattgggcgtgaacggacaggccccgaaattctttaagaaagtttcttcgagcggtgtgccgatattcggtacgtttgccgtattaatcggacttgtgatcggtgtcgtgctgaactacatcgcgcctccgaaaatctttgtctatgtgtacagcgcgagtgtgctgccgggaatgattccgtggttcgtcattttaatcagccatctcggtttcagaagagcgaagggcgctgagcttgataagcatccgtttaaaatgccttttgcgccgtttacaaactatttgacgatcgctttcttactcatggtattgatcggcatgtggtttaacaaagatacgcggatttctctggttgtcggggtgattttcctggcgattgtgacggtcagctattatgcgttcggtatcggcaagcgcatgcctggtgaaaaatcgaaaatagaagacgctgtataattcaaaaagacacctctcttacaggggtgtctttttcggcttgtccgcgagtggtatactggttaaaaaaagcagaaccgggggaaacatcgatgagtcattaccgtacgttattatttgatatagacaatacgctgctggattttaccgcttcagaaaccgatgctcttcaaaaattgtttcaaggttcaaagctggagctgacggcagaggtggaagcccgttataaagcgttaaatcaagggctgtggaaggcgtttgaagagggggaaatgacccgcgatgaagtggtgaatacacggtttgcccttttgtttaaagaatacggcttcgaagccgacggcgtgctgatgaatcaggcgtaccgccaatacttagaagaagggcaccaggtgatagacggagcttatgagctgattgaacggctgagtcctttatttgatttatacatcgtgacgaacggcgtctcaagatcacaatataagcggctgggcgactccggtctgtatccgttctttaaagatgtgtttgtatctgaggacacgggttttcaaaagccgatgaaggaatactttgattacgtgtttgcgagaattcccggtttttctgccgagggcggacttattatcggcgattcactgagcgcggacataaaaggcggccagatggcgggaatggatacgtgctggtttaatcccggaaagaaagcaaatgagtccggaatcatcccgacgtatgaaattcattcgcttgatgagctgtatgatgtgctgaacgtggagcggaaagccgctgctcatttgtaaggagaattcgatgaagattgcacatacgaagttactgatcaggggttttgcattactatcaatctttcatgcgattcttcagcttcctcccggccggggggagctgaaggtttttttgtctgtgctcgtgattatgctgacggctaatgactgcctgcggccgctatatatgaagagaaggccggctgtatatcaagtctcttttttcctgagcagcgttatcgcgggagttcttttgtacaatgtctatagtgtggggacacaggccgtaatggtgcttttattggcggaggtgcttattactgataagcagatttcggctgttttgttaacgatgaatgccgccgcatttgccgcagctttatacgccggcggagcgggtgtcagtgatatcgtgccgccatacttcatcatgtttgcggtgatttatttatatcggagaaacctgcaggagaagtcgaaggttgaattgctgaaccgagagctgaagatcgctaatgacacactgaaggaatattcagaccggattgaggaactggccgttacgaaagaaagaacaagaattgcgcaggagctgcatgattctctcggtcattatctggctgctctgaaaatgaatttagaatttgccgggaagacagccgggcatcagccggacaaagtgaagcagatcattcataaggcgcatgatcttacgaaagaatccattttaaagcttcgccaggccgttatgctgctgcagggctctttgccggggcggggatttgagcaagagctccgtgacattttcagccattttcaagaggcgggaggcatacgcttcgagctggagacggacgcggccatagaagcggaacagccggatgtgaagcattgtctttatcaatccgttcaggaaacgattacgaatgcgataaagcatggacatgcttcatatgtttctgtccggattcaaaaaaaccgaaacatgatattggcgcatattcataataacggctcagcctgcggaacgatcataaaatcaaatggtctgaaaggaattgagaaaagagcagccgcacttggcggagaggctgttttctcgtctgggaaggaaacgggttttgacgtgaaaataaggattccatgcaaggaggaataatcaagtgaatgtcatgattgcagacgaccagtccattgtgagagaggggctgaaaatgattctgagtcttcatgaaggaattcaaatatcgggagaggcttctagcggcgaagaggttctccggctgctttctcaaaccgaaaccgatgtgattttgatggatatcagaatgcccggtatggacggaatcgaaacgacaaaagcggtaaaagcgcgatatccgtccgtaaaagtcatcattctgacaacgtttgaagatgatcactatatttttgccgggctgaaaagcggagccgacggctatctcttgaaggatgctgattcggatgaaatgatcgactcccttcaagccgtttatgaagggaagatgatgctgaatcccaaaatcacggtttccgtcgtaaaagcgctgaacaatatggagatccctgcggtgcagaaagagccgcggacaaagctgaaggagattctgacgccgagagagcttgatgtggcaaaacacattatggaaggcaaaagcaataaacgcattgccgcagacttatttctgactgaaggcactgtgaaaaactatgtatccagaatcctcgataaacttgaagtgtcaaacagaaccgagcttaccttatatttgcaaaaattgctataaccccgcttcaccctcctctctccctttttatcactaaacatatgacgaaagtaatacccatatcgagtacgaaagtgaatagaaaacaaggattgccaagagtagaataagtgcagacatgacacaaggagtgctgcacgaatgctcgaattaacggatttgacaaagaagtacggcgattttaccgctgtcaatcatatatcactgcgcgtcgaaaaaggagagatattcggtctcctgggaccaaacggcgccggtaaatcaactacggtgtcgatgatcagcaccgtgctcccgccgacgggcggaacaatctgcattgacggaacctcattacaggagcagcctgcggccataaaaaaagtgatgggagtcgtcccgcaggaaatcgctttatatcaagcattaagcgcaaaggataatttggcttttttcgggagtctgtacggactttccggtaaggaactttgtaaacgggttgatgaagtgctggacatcatcgaattacaggaacagcgacatcaaaggatatctgagttttcaggcggcatgaaaagacgggtgaatatcggggccgcgctaatgaatgaaccgaaactattcattttagatgaaccgaccgtcggaattgatccgcaatccagacaccatattcttgaaaccgtgaagacgttaaatcaagaaaaagggatgaccgtcatctacacgagtcattacatggaagaggtcgaatacctctgtgaaaaagcggcgatcatggatcacggctcaatcattgcctgcgggacgaaagatgaattgaagcagtcagccaaagcctctgataccctgatcgtgaatgcagaggggctgaatgatgacgccgttaaaaaaatccgccgcattcccggtgttgccgaggctgctgtcagccaacagaccattacgatgctcgtctctgcggcagatcgcaatatccttgatattgcggatgatatcaggaaaaccggtatcaccattaaaggcattcatttcgaggaagccaatctggaaaccattttcctccggctcaccggcaaaacgctgcgggattcatagggggcgtcatgaaaatattattcaggctgatcttattagattttcggttattggccggagcaaagtctttctatataaaactgattctgtttccggcactgatgatttttattttaggaacggtttttcacggcgattcgaaagtgaagccatttcagaccgccttttataatgcggatcacgcggagagttctttgggcgacgtattaaagaatgacgtgctgaaacaaactgatctcatccgtgtaaaagacataggcagttaccatgaagggaaacagcttgtcaaaagcggcaaagtctccgtttttgtatacgtgccgaaaggctttgcaaaagcggcagaacacaatgaaaaaacaagtatcaaagtcatctcggaccaacaaggctctgtaaacggagacattgtggaaatgatggccgattcgtttgtcaccagagtaaaagcggagatcagtgaagaaaaagcggtgctgaagcagtcgggacatctgtcaaagggagatgcccgcaaaatcatcagcggcctttcgggtgaacgtgaactggctgtcaccattccgaaacagtcggccggcaatcacgcggctccgattgatgcgatgcagtattattcaatcgcaatggtcgtcatgttctccattatgaccgcgtttgcgctcattcacgggatagtggaagagagacagcagcacacgttattcagaatcaaatcaatgcctgttttacgtatccagtacgtggcgggtaagcttttgggaatcatgcttgccatccttatgcaaatggctgccgtcatcatcgcaagcagcatcttgtatcaggtaaaatggggcaatttgtttgaaatattgctggttacgatcgtttattcatttgcgatcggcagtatcgtgcttctttgggggtttactgcaaaaaaccacgagaccgtctcaagcatggcggctcccattttatacggattcagttttttaggcggaagctttatcgcaaaagacggcttgcctgacagtttgaaaattgtccaggaactgataccgaacggcaaagcgatcaacagctatgtcagtgtcacgcagcatgccggtctgagcggtattgcggcggatttggcagagcttgccgccatcggcgccgtgtttttatgtttgaccatctgggtgtttaaacggaaggaggctgtttcatgacgcagctgttattcatgatcagacatcagctgaaactgatgctgcaaaatcgggctgccatctttgcgacgatttccgccccgctccttctcacatatttcttttccttttctgcggatggcagtcagcagaagaaagtatatgtagctgatgaggatcagagcgcctattcagcgcaatttatgaaaatgattcagaaagccggccatataaaattcacgaaggtcacggaggacgtattaaaaacaaaggttcatcatcaggatatatcctttggattgctgatcggctctcattttgaagagacgttattttccggagatgaattgaacgtttcatttattcagaatgaagaaaagggtgatgctgttttgacagagcagctgattgcgcagcaggcgggcgcgctgaaaaaaatagtccgcgatgcaaaagtgatatcccgcacgctgcacaccgacgggaagcaggcggcagctgatctcttgaaggatattcagggtcattccgccgtcaatgttgaccgccatcacgtttatgaaggcggacaagcagccgacagacttatcgggtttttagtgatgtttatctggttcgttgcagtccaaagcctgcgatcatttatagatgaacaagaaaatcatacatatgacagattgctgagcacgcccgtttcctatacagcatatgcaatctctaagtttgcggcggcgtatcttttcggacttctccatattatcgtaatcctcgctgccggaacattcatgctgcatatccgttttgctgatcatgtttttgctgcgggagcggtgcttgcggcctgctcgtttgcgctgactgctgtaacgatggccgtgataccgttcatgaagagccaaaagcaattcacgtcgcttgcttcggtttttatagctgtcacgggtttattgggaggggctttcttcacattagacgcggctccggagtacatgcgcatgctgtcgttgtttactcctgaaaaatgggcgatcggcgcgtttcaaaacaatggcggaggcagcatgcagatagtgccgctgagcctgtttcttgccgccggtgcagcgtcattggtcttatcactttatatgataagccgtcatatgaaaaaaaacggttagaagggtggctgctttgtatatggcagaaatgatcggaatcatagaattgctcgcgggagttgcaatgaacgtatggatcgggcggctcggaaaaacctttttcggtaaagatgacagaagttcgagagtcgtgttaagaatctgcggcatctttctcatgatcaacggcgtttcaagagcgtttcatatctagttcacaaagtgttccggactcttttataaaatgtaatctttttccttgtaaatcgtgtaaaatagtataggattctacgaaaagaataagagggggaagaaacatgaaaaagagactcgttatgctattcgcggcggccgccgctgttttgttgcttgtgagcgggttgtgggctccatcagcgtctgcggcgccggctcctgctttaacacaaatccgtattatcggtgtgacgtctgacggtcagagttaccaatgggaaaatatcgggccgaaccaaatcagcgcatcaaaaccgatgaagggtacaacgggttatttagccgtatatttccaagggtatccgaacaataacacgatccaggcatttaacaacggaacgaatattacaaatcttacgtcaaaagcgctggaagatgaatatacgaaaaacggcaatatcgttacaggctacattaaatattacagtgttcctctttcttatgtcagttcaggaacgttctctttctccgcaacggggctgaacgggccgtacacgccgttaagcagcggatttttctccattcaggtacagagttaaaacagccgcccggtgctttcatgtatagtttttctctctttccgggaagctattcctatagaaaagggagggcttacatgatggacaggacactcggatatttgcgcgagtcgctttcgaaccacttggagcatgatgtgtgccgagggatttataaaaagcttcaggtgaagcattatgcaaatgagggcgagtttgtgaaagatctaaatgatttggaaatggatgcgctgaatcagctgcttgaaaaggaaatcaaatatgctgagaacgagcaggatgagaagcgcacgatggaattgaatgaagtatatgagctcctgttttaaaaagcctcccggcggtcgggaggctttttattgtttcggaaacagtttacagaatcatccaaccctttgtataatggatagttgtgaaaaacacagacggaggagaaacatgaacgaaataaaaaaacagacggttcttgagttgtcatcggttgaaaaaactttggtttttctggtgccgccattattggggctggtcatcggatggtttctgccggtcattgcgaagtgggccgtaacattggattggctgccttttcacgggccgctggacattatcgcttcttttcacggatggaaggctgcggctgcaaccgccgttatcggcttaatcgggggagtgtggctgacgcgggcagcttttaaagaaactcttgtggcagtcgtgacggacagcgaggtgtccttaaccatatataatgaagaaagcgtgttttcgaaagacagcatttccggtgtgtttacggatgaaaagcatcttgtcttattggggactaaagggcaggagctttttcgggagaagcttgagcccgcggttgaaaaagcggctgatgcgtttcgcgcgcatgggtatatctggctggggacggaagatccttttaaagaagaatacaaacggtgggtgccggacacgccggatttggagcctggggcaaatgctcttttaaaagcgagagaaaaggcgctgaaagaggaggaaaaggctgatgcgaaagagctgaaagcggaaatatccaaactgggcattaccgtgcgggagaaaggatcgcgccaatattggcggatctatcaaacgccgtctgcataaaaaaagctgccgccgtttgatacggccgggcagcccgggaacagattatttcttcttgtcatcataatattgaaccgggtacatggagccttcggataccattttgttatcttcaatatcttcgggatgcgggttgcctgctttgttgacggggaatgattcaatatcctgcttcccggagagcgatgttttcatattgcggataaagttcatcaccttttggcggtttgatttatctttgagcaggtaggaagtcactccgacagtcgacacggcaagtcctgaaatgagcagtttttgtttcacgataaaaactcctttctatttctggcttgcagtagttattcccgcttaacggctgtttaaacatcggaagggtaattttggctttctgctttaatgcgataaagattgacaaaactattttcagaataatattataaatatatgatagcgctggagtcatattttaattgaaaggtgttaactttatgaatcaattacatcgcagaatgggaacgtttgcactcatgatggtcggacttgggtcgatgattggctccggttggttattcggggcgtggcgggcggctcagattgcgggacctgccgcaattatttcctggattatcggtatgatcgttattttgtttatcgcactttcttacagtgaattgggttcaatgttcccggaagccgggggaatggtaaaatatactcaatattctcatggatcatttattggatttatcgcaggatgggcaaactggattgcgattgtttccgttattccggtggaagcggttgcgtctgttcaatacatgagctcatggccgtgggaatgggcaaaatggacaagcaatctcgttcacaacggcactcttacgggagaggggctcggcttcgcatccgtattactgattatttactttttactgaattattggacagttaacttattttcaaaagcgaattcattgattaccatctttaaaatcattattccggggctgacaatcggagcgttgctgtttaccggttttcacggcggaaacttcacatccggttcaagcattgcgccgaacggctgggcaagcgtgctgacggcggtggccacatcaggtatcgtatttgcgtttaacgggtttcaaagcccgattaatatggccggagaagcaaaaaatcccggcaaatcgattccgattgcggttgtcggttcgttgctggtcgcaaccgtcatttacgtcctattgcaaatcgcatttatcggtgcggttgaaccttccatgatcgttcacggctggagtcacctgaacttcaactctccatttgccgatttggcgatcgcattgaatatcaactggcttgtcattattctttatgcggatgcgttcgtatctccgtcaggaacgggtattacttataccgctacgacgtcccgcatgatttacggcatggaaaaaaataaatatatgccgagcattttcggaaagcttcatccgctgtacggcgtgccgcgccaagcgatgattttcaacctggtcgtatcgtttatctttctgtttttattcagaggatggggcgtgcttgctgaaatcatttccgttgcgacgctgatttcttatatcacgggtcccgtgacggtgatgacgctgcggcggacggcggcggatttgtaccggcctctccgtctgaaaggcctcagcgtggttgcaccgctcggcttcgtgttcgcgtctctcgtgctgtattgggcgcgctggccgttaacagggcaggtgctgtttatcattttgatcggccttccgatttatttctactaccaagcgaaagcgaagtggaaaggattccgcagaaactttaaaggcggggtctggatggttgtctatctgctcagcatgatggtcatttcatggctcggaagtgaaaaattcggcggtctgaacatcattccgtacggctgggatatggggctgatcgcaatcgttgcccttgccttctatgcgtgggcgctgaagagcggattcaagactgagtatttgaaagacgccaaagcaatcaatgatcaattaaaaggcggacaggccgaagccgctgccggaaaagagtaatgattaataaaaaccttgcgggaacgttcccgcaaggttttttgatcgggcaaaaaaacatgggttcgatacagacgtgacgatgaatgagaaagcctaacgacaggcaaccagggacagtattctttttttctcatgatttctccgccttatcaataactgtcttccatactaaagaatgaatctaaaagatatgttgggcaactattaatcttttatgtttcttcttctccatgcttcatctttttcctgtactccaaagtcaaagttttagagacaaaacaaataattaaccatagaataaatacagtacgtaagttgagattacaataattgtataataaattaaaatataggaaagtaaatagttagggataataagtatgaaaacgcgaaaattaggactgggcgtctacccaagagacatcagagattccgattatacaaaaactatcaaaacatttagatgaattattttcactccctaagtttatttagggagtcatattattttaaggagagagattatatttgaacaagattaagtggcttattataattgcggtcatagtattaataggtatatttatatgtattggaacttttaaatatactaattcagtttctaatgttaaacaaactgaaaaagaaaaggaaaagtatttcttgaatgataaaattgcagctatatattattcagctacaatagattatcctaaagatgggagttatactgtatacattgatgaaaaaggagcagcaacagctgtaaaaggagatgctattgaggttggaaccattgcacaagatgaaaaaaacatagttagacaggacaaaaaagaagtttatatgataggcgataactttaaaaaattcccgatgcaacatcaagtacatacaagttatgggcaatcatcaggccatttaataaaagaaaatatcttttattttttgaataatcaaggagtcggtgaaaaccattataatagtttaattagatggggtaacggcagtggatttcatgaaaagattattccgggtttctatacaagtactggtaatgacggtgaatatatttacgtgataaatgaagattcttcaattaaaacaccgacttttcagggtattaaaatagataaagataaagttacagtagggaaaggaacaacaattcctgtattaaatgaagaaaattggagtgtttattcacaaataatagttaaaaaaggctcagccttttttatactatataaccaaacggataaatcaaacaaagtacaattcaaagtagcagaaattgatttaaagcataaaaagtttaaaggggcatatcctttaggcagttatcatatccctgatgaaatttctcaactggcaattcctctttccactaataacttttttgtgaaaaatgacactttatatcatttggcagctaattcaatactttatactttcgatctgaaaagtatgaagccgggaaaaaaaatcccgttaaataggtcgacaaaatttgaaaaccaagcaaaattcacttattttgacgagtctaaaattttcttgttagaaataagcaagggtgggaaatatgtgattaattcttactcttataaaaacggaaaaaaattaaaatctactcctgtcagaggacttgaaaaaattattaacaatacccatgtttctgaatatgacttttttatgattaagaaaaacaaagaagtttggagtgattagatacattttttaaatcgctagacagctgagtgagtatatttaaagggaaattaaattcacaaaggagaataataatggatgagctagatcttgcttttggtattttaccactttctattatcgtcttatcgattatattcacttatattttcaaaaaagtctatataatgccgcttgtcagtatagttgtttcagtcatattaatgttcactgtttttaatctatccttctggggatgggtggttgtctatggtttagtatcacttgtattatcgtctattacaaatagtataagaaagaaactagataatagaaataaataattatattcctttgtttaaaaaggtatcacaagtaattcatcattacagtgatacctttttacaattaaggtgagtctcagccttttaataatatgctccgcccgctacataacccatgatggcgtttgcatgatcgggcaaaaacatgggttcggcatcatctccgaacccatgctggctttatgatttgtattcttttttaaccttttggaatatatccgcatagttggtaaacacaccggttacgccccaattcagcagacggcgcatgtccgcctcgctgtttacggtgtaaggatgaagcagaaggccgtggctgcgaatgtttcggacattttgagcgttcagcgctttgtaatccggtccgattccgacggcatatgttttaatgtccgttaaatctgcgttagtcattgacgtcatctgttccgcttcaagtaattggacggcgggaagtttcggatcgagctgtttgattttcagaaggctgtccctgctgaaagactgaatgataacttgtccaagtttcgcatgcttacctgccaatttgtattttttcagtgaagcgatcagtttttcttccatacccggatatgtttcgggcgcctttgtttcaatataatagtttgcatgtctgccgaaccgttttaacacgtcatcaagtgtgggaacgcgaagtccggcgtattgcggttttgctttttccggataggccttattgaaccaagagccggcgtcgagcttttgaatctcggctaatgtatgatccttcacccagccttgtccgtttgtggtgcggtccagtttttcatcatgcatgacgatcagcttgccgtcttttgtcatttgtaaatccagctcaatatagtcagccttcattttttgcgcagtttcataagaaaggatcgtgtgctccgggacataccccgaagcaccgcgatgggcaatggtcaaaattctgtcaggagacaagaggtttccttttcccgctgccgatacaggcgtgacgatgaatgacaataaaccgaatgaaagcaataccaaagcaaacaatttatgtttccgcatgttttcttcccccttaaaaatcaatatctgtctctagtgtagaaaatcgttgtaaatgctgtactgcaaaaatattaatcttttatgttgttttcttacacatgctccgcccgcttgcccgtattccacgtcatagccaagaagacgatggacagcacgcatgaggagataagcatgataaagccgccgttccagtcaaagcggtctacgacataacccatgatggcgttggcgaaagcagagcctccgatgtagccgaaaaacccggttaagccggctgccgttcccgccgcttttttaggcgcaaggtcaatggcctgaagcccgatcagcatgacaggtccatagattaagaagccgatgctgatcagcgcgatattatcgatgagcggatgaccggcagggttaagccagtagaccaatacagcgataaatacgccggccatgaacagtacgcctgccggcgcgcggcggcttttgaaaaaccggtcgctgatccagccgcacaaaatcgttcccggaattcccgcatattcataaaggaaataagaccatctggaatcttcaggagagaaccctttcgcttccgtcaaataagtcggcgcccagtcaacgacaccgtaccgtacgaagtaaacaaagacattggcaaatgcgatataccacagaaacttattattcagcacgtatttgaaaagaatttctttggtcgtcatctctttttcctggtctttgaacgcatgtttcggatagtcattccggtattcttcaatcggcggaagcccgcaggattgcggcgtgtcccgtacgagaagaacaatcacaaatgaaatgacgatggcgataatcgccggaaagaaaaacacgcttttccaagtaacaaacatggcgatgccgagagtcacgagcggggcgagaatacctccgcctatgttatgggcgacattccatatcgacattttcgtgccgcgttcactgatggaaaaccaatgagccatcgtccgtccgcaaggcggccagcccattccttgaaaccatccgttaataaacataaaaataaacataatcgtcacgcttgacgtgacccacggcatggaaacaaataaaatgtttaccacacctgacaaaaacagacccgtcgcaaggaaatacctcgggttgcagcggtcagacaccatccccataataaatttactgaagccgtaagcgattgatacggccgcaagcaccaagccaagttccccttttgaaaacccttgttcctgaaaataaggaatagcgaaggcaaagtttttgcgaagcaaataatacccggcatacccgatgaaaatccccaaaaatacttgcagcctgagccgcttataggccgcatccgtctttgaatcatccaatctctcaatatgcggagccggcttaaacaattgaaacatcatatcctcccctttgctgaacgtctatcatgatgtatgtatgactcctttccttgaaaatgacaaaaagaaccagaaatcacccttgtgaaagggcggggtttcctggttctcctcatctccatccaaaaatcattaacttgtgtatgatagcgctttcttaaattatcatagtctgacgtgaatgtaaacgctttaaggaaagttttcatttttttgaataaataaccggagggaaaatcagccggagcgcgaaagatttgaagtactcgattttgtactcaggcataagatgtgttaggccggactaagaaaagcgaagggagtgcatctgttgattgatgaattggattttgcgttcggtgttctgccgctttgtatcatcatcttgtcagtcgccggaacgtacctgtttaaaaacgcgttcattatgccggctgccgctttggccgtttgccttatatgcacctttaccgtattgaatttctcgtttatcgggtgggccgtcgtgtatacgcttgtctctttcgcgttatcgcatattacgatggtggtgatcagccaaaataaaaaataggatcggcggcagccgatccagctatcataagcagagatgcgctctctgctttgttttatttatgaatgtgcaggaattccttgatgaccgcggtctgttcttctttcggatagcttctgtacagatggctggttaagcggacggggtcaccgaagaagtaccgctcatattgtgtctgtcttgttccgaaggggctcatggtcaaatcccatgcgaggcggaacacttttacccggtcctcagcgttcaattcggccgcctgcaaatattggtcaaggtctcctctgatgtcagaacggaacgctttttcagtcggcaaagtcaccattccgcttgccccgatcagctgaatgatttccgtgaagcgcgggtagatgtcgggaaaaatcgcgctgaccacacgaagcggagtgacactcggacgcatataaccccattcatctgtttccgcatcattctccgacttttccaaaagggctttcatcgtttccagaccggtgatgatttcagccatcttagcctgaatatgctgatattcgcccacatctatcgcttcgacaagcgtttgggcgaggcccaggagaaactccgtctttacaatttgtctcgtgatgacttgatgaaatgcgaaggcgttaaaagagcttttcatattaaaatcaaaagccgcctcgtaattattataaaaaaatacgcgttcccaagggaccaaaacgtgatcaaatacaacgatagaatccatttcttcatatcttgagctgagcggataatcaaacgatgattttccgagtacgaaagattccctgcagatgaattttactccctttgtattggaagggattgaaaaagcgaacgcttcatccgattcaaaatacattttaggcagagaaaccacgagcacttcatccgtcaggccgccttgtgtggctaaaatccgggcgccgtgtatgatgaggcctttttcatttttatcgacgacttttgccgagataggtgtcggcgatacgtttacacccatttgtgaacgattcacctgaggggtgataaacgtgtgcgtaaaagaaagatcctgtgcagcagcgcgttcgtacagcgcttgaacatgttccggaaaacaatgatcgcggtctttcaaaagcgcggcagaggaggcgaagctcatcagcacggtattcatataatccgggcttcgtcccatcattccgtgcgtgtgtctggcccaatgttcgaacatgtttcttcttctttttacgtcttctttcgttttcggctgcaggtatgaaagcccggcccgttcttttttaccgggaagactgtaagtcatttgatctttcatgtccggtttcgtttgcaaatcataaagagagcgcttcgtttccagaaggcccttaaatgcgggatgttcagaaatctgtccctcgatcttttcaccatcaagccaaatctcatttccaagctgatttaatcggtcaatgaacatttttccattaatgatacccatcatgtcgcccttctttctttgcagatccactacctcattatattgaaaacgaaattgggtgttccggttatttccaaaggggaagagccttttttgataaggggggtgacgggatttcataataaaaaaaccccttaagcagaggggtttttaactgatcatgtctttgtatcgttgttcgaggacaaagtctatcattccggtgatacgggtgttttcagatttttgtctgaaacggtcagacacttggatttttcttgaaaacggaaatacagcaataacccaaacaaggccggccaggccgaaaaccatctgcagagccatttcaatcaaatcattaaaatgagtgctgaaaaaaaagatatataacgtgatgaatgtgactgtacatacgattttgacagtatgttggaaggtgaggggcggttcagtgaaacacattttcatttgattcagtgtgagcgaatcttgtttcattaagtatgtaagcagttctttgtcattttgacttcgcggaatcaaatcggtttctattttttgaacggtttccttgtatgtctgcatatcaatcttcatgcgaatcctcctttagaaataactccaagaacactcattgagcattcctggagcaaggagctgcctgttcaattatagaaatagtgataaaaccgtgctgaacaaggctgcagctcctcctaattcaggtgctaaaacgactagagcaccgatccctacaataacaataattcctgcgcctgcaatagccatggtattcacgacagaatcccaatccggagagtacactttttcggaatccggcaacctgaagctcttttgttttattttaaatgtaatggtagttgttagtccagttgtagcactgtcaccgaccggaatatcagtataaattttaaattgaatattcagcgatcccgcagccggattgacatacacttctaaataaccgttgcggactgacaagctcagactgttaagcaggttttgataggaatcaatttgtgatgctgtaaaagagacttgtgaatcccccatcagaccggtaatataagctcccggtttgccatttgtaatggtaactgtgttgggagaaccttcgcttggcactgttgccaaaagtgaagtagataaaagaatatccatttcaggtgatgcataaatggtttctgtcttgtcgaattcaaacatggcattcgcaagattcgatatattttctaaagcaggaatggttgttaaaatatccgtcagtgtgcgcagtcttgcatcatacacaggatcagaaggcggatggacgctgcttgcacccgagtctttcccggagtatccgtctttgtcaatggcgacttttcccgctccgcttccgatcgttccttcataaaattgatcaaaagcccagtttttcggcatcgggtatccgaggttgccgctgaatccggtcgacatgttagccgtaaagctatatttggtcagacctgcttctgacgtccggatacaaatgtttctcggtccgtataccccgatttcatatttcggcgcagttgagaacgcctgcattttcataaaagctgacttgatttcttggaagtaaggaatgattttatccgtgacttcataatcatacgcatcgaaatcgaccgcaaagtaaatggtcgttcctgacggaaaacctaatcttcgggcggctgatgcagcgctgtacgcatctctcgttccttggtcttttacaaaataagaagattcatagccgccgtcctgataaatcggaaacacgcttaagccggcattgaaaatcgtggaaagttcttttgacgttaacgctttcgatgtcagtccgctgcttgtccgcacattcccggtcagatatcttcccacgatcttatagccattctcacgcaaagttttagccgtatctgccgtcaaaatggtagcggtgtcacaagctgaagcagcccgcgttgtgtcgcctgagcttgataataaagctttaatcgtcggcatgtccgcataaccggtctgcggcaggcacataaacttttggaaagctttcactgccgatacaactccgacgccgtattttccgtcgaattcaccgggatcaaacgcttccccattacagtaaagcgcgtattggacaatcaaaacaaagcctgtccgtgaatcgccgggagtcaaggtagggcataagctggtcgtgccgtttccgaaaaatccattggcgacgcttgtgctcatgccttcttctttttgcagggcataaatgagagccttgtttgtatcgcgggcgtataagccgtcacaaggcatcaagccgatgtagtcattgtaatcccggttcaggttctgctggatttggcggattcttttgtcgcctcccgctactaatcgaaaagcgctcatatccagcaaggctttcataatgagtgccgtgacgatgccgtcttgcttagtgagcccggccgctttttgaaactcttttacagccctttcggtattttcatagaaaacgcctgaaaatccgccggggttaaaacctttacaccacagcgccccctgcagaatgtaattcatgtttgtcggcttagaatcgggagcctgctttttcaacggcttaaacaatctttgtgtcgtcggtccgaagttatcggcaggttctgaaataccaagctcaatttgaagcgcccgtgtcagaccgtaaatggtatcccagcccgtttttccgttttccggcactttgttgtacccgtgtctgcctttgtacgtctcattcagccattgttgtgtttccaggaccatttcgtccattgcaatccctccattatgtgtattgtgcgttcattcataggtggcaaacgtatgacagtttgtcatgggtgcaggggtttatccaaggagagccccatcacggcagcagaacaaacgccgaaagagaggcattgataggaaaagacctcgctatgacaattgatacaaaaacaacaaaatgaatagcggtttaaagtaactttatcacttaatcaaaaatgacaagaatcataagtagtagtcatatagtcattttaagggctgttcacatctcctcctgcggtcaaaatggttagttggacggatttatgattggctatattgtcattaacataaatagggtaaatagttacaggaaggaaggattttctcgatgaaaagcaaaaagatttttaagtcgctcatcattatttttactcttttaatcagcggaattggttttatgggtttttcttctccgcaaaaagcagaggctaaagactggcttcatacttataaaagcgggtatttcactaactatgtgatcaatacatatcaccctaaattcactaaaacgacaaaaaagtacaccttgagagccgtgacttttaaatccaacagtaaagggaagggcacgtataaaatatacgtccaaaagcaagtcaacggcaaaggtgcctggaaaacaatcaaaaccgccaatgcaaagaaaaatggaacgacttattttgaaacaccttcgttgaaaaaaggagattcatacagatttaaattggtcaatcagggttcgaaaaaacgtgtcaattatagtgcaagatggattgtattcgcttcataatgctgatcttccggtctataaagttttagctgctgcagctgcggcagctttttattttgtccggagctcaaccgccagggagccagcacctgtctcttcgggcgtgcgtttgtatttcaccgcatcattctggattatgcggaaaggtacattgcttcaatgataagccaatccagggttcttttgattcgtttgaaaatgttctgatataaaaaaggcgtgccgcggtgtaaaatggctatattgataaatatggaggttgagatggatcaagattatatgactgagcttgtctcagtccagctgaagaaaatccggtcggagagaggctacacacaggagaaaatggcggatgtgatcggtctttctaaaaagtcgctggtgcagattgagaaagggcgggcgcttgcggaatggccgcatgttgtggcggtttgcgcgcttttcagatcaagtgaaacactgcaatccgtattaggagatgatccgctggaggtcattgaaacggttgctcaccgcacaattgacaggccgaaggggaagacgatgggcggcaaggtgtggtggaaagccatcgagaaaaaaggcgagttccgcttgcagcagcatttgatttcccaccattaccgcatccttgattcttatgatgatctgtggttcagcagttttgaaaaggcagaggctttggagcggcttgatgagctgtttttggaggcggaagaaacgaagcgctaagcacctccggttgatgtattttctgacaagtgggaaaatatatataaattccagccaaaggagagattcgaatgaagcctgaagatatcgtccgaagcggcccgaatcagtacatatgcaaggaaggaatcgcaaaagaacttccggggctgctggagacattcagaaaacccgttattgtgaccggaatcaaatcctatcaggcgttctccgattacggcggcggttcttcctgggatgtgattcagcataaaggatactgttcacctgaggcggtgcgtaaggtctgtgagcaggcggaagacgcggatgtgatcatcggtatcggaggcggcacgatattggatttggcaaaagcggcggcagaccggcttgatattgaagctgtgatggttccttccattgcggggacgtgtgcggcaagtacgccgttgagtgtcatatatgatgagagcggcaattttatcagagttgattatcataagcgttcaagctatttgacgcttgttgatccgctgtttttgctttcctctcccattgaatatatgaaaagcgggatcggtgatacgctggcgaaatggtatgaggccgaggcggtcatcagaaatacggaggcggcgccgctgatggcgcaggcgggtctgagacaggcggaatatatccgtaatctgttattgcgttacagtgaagcggccgtcggaagcatggagaaaggcgagctgtccgtgccgttcatccatacggcggaaacgatcattatgcttgcggggacggtcggcgggtatggcggccgtttgtgcaggatggcaggggcgcatgcggtccacaacggactcagttttcttcaggagacacatcaggtgctgcatggccagaaggttgcttacggcatattggtgcaactcgcgcttgagaatcggagacctgagattgaagagctgcttccgttttaccgccggctcggtttccccgtcagtctctgtgatctcggtatccttgacaaccatgaggaagccaagcgccgcattgcttctcacgcctgccgggcggaagaatcgttatgcttaatggggcaatatcgcgagaaggatgtgtcagctgcgattgaatcgctcgaatcagcgcaaaagacaggatagagcttgttatctatcttgtctttattttttgaatatttccgttataatgagtggggtatagaaagggaggggccaaaggacatgtatcaggcgaagaagatgttgttattaggatcaggcgagctggggaaagaagtcgtcattgaagcgcagcggctcggggttgtcactgtagccgttgacagctatgagcatgctcccgccatgcaggccgcgcacaaaagctatgtgattgatatgcttgataaagcgcaggtcagagaagtcattgagaaagaaaaaccggacttgatcgtgccggaagtggaagccattgcgacggatgagctgctgaagcttgaggaagaaggttttcacgtcattccgaatgcgcgtgcggcaaagctgacgatggaccgtgaaggcatcagacggcttgcggcagagacgcttcatcttccgactgccggctatgaattcgcgaatacatatgaagaatttaaagaagcggcggaaacaatcggctttccgtgcgtggtaaaaccgctgatgagctcttccggaaaagggcaaagcgtgtgccgctcggcttccgggctgaaaagctgctgggacatggcgatggaaggcggccgggtgaaaaacggccgggtcatcgttgaggaattcattccgtttgaatcagaaatcactcttctgacagtgcgcgcggcgaacggtacgtccttttgcgcgccgatcggacatgaacaaaaagacggtgactatattgaatcatggcagcctcatcatatgacggaacagcagatcaaagaggcgaaacacattgcgaaaagcataacggacgagctcggcggatacggtttgttcggggtggagcttttccttactgaagataaagtatatttcagcgaggtgtctccccgtccgcatgatacggggctcgttacgcttgtaacgcaaaatttgtcagagtttgcgctgcatgtccgcgcggtattgggattcccgattccggaaatcactcagctgtcgccgggggcaagccgtccgctgaaggcgccaaaagagcttgctgattatgcggttgaaggtttggaaaaggctttgggggtaaaaagcactcaggtccgcgtattcggtaaacccgtcacgaaagtaggacgccgtatggcggttgcgctttctgcagctgagaccgttgaagaagccagagaaagagcggccgaagcactcagtcatttatcaattacataaaatgatcttaaaaggcgtttttaccgtaatggtaaggcgccttttttgtttggcagactatatactggaaaacggggttgtgagataatgtatgaggccgttttgtgccggctttttaattcatgaaactttttatgtccgcaatcgttatatgtaatgttctcatttcacggagaaggaaataacaatacatcatacggcttttcattcatcaagaacggacaatccggatcgcggcatggaatatttaagcagggtaatccggaatagaggaatccatgattgcttaccttaatatgaacggcgaaaaaacaaaaatcaccagattagattgttcaaataacaccaaatgctgtataataaaagaatttgaatgatagcattgaaagaatttcattttatgtttccgtaaaatggagcctttatgtatacgcagtccgatttgatatggttttaattggaggtttgtgtaaactgtgaattatatacctagtatgattacaattggaaattttatttgcgggctcttatcgattcattcccttttgtatcataatatacactctgcggtgatctttattttcaccgggatgtttcttgacttctttgatggtttggccgcccgtaagctgaacgcggtatcggagatgggaagggagcttgactcttttgctgatctcgtgacgttcggcgttgcgccgtccatgctcgcttacagtgtttcactatatacgattccgttcatcggaattttaatcgcgctttcctacagtatctgcgggatgatccgtctttccagatttaatattgaacaaagcaagctgccgacgtttatcgggatgccgattccgtttgcgggtatgtgtcttgtcattttgagctttatcaataacgcttttcttctgggggcgggaacgatcgcgctcggttatttaatggtcagcaacattaaatttccgcactttaaaaaacaggcgcctgaaaacctggagagcagaagatggaattagttcagcaattaatatccgattacggatatatcgcgatttttcttatgctgacactcggtattatcggattgcctattccggatgaagtcatgatgacgcttgtgggctacttcgctcatttaaacgtgctgaattacgggctctccattctgatcagctttatcggagcgcttctggggatgattatcagctacttcatcggcagaaaagccggccggccgtttattaataagttcgggaaatgggtcggcctgaaggaaaagaggatggagaaagtagacaggtggatgaagaagtacgggccgtacaccattattttaggttatttcatccccggcatcagacacgtgacctgctacttttccggaatcggcagaatggaattcaaaacctacttatgcttcgccgccatcggagcgtttttatggtgttttatttttattactataggaaaattcataggagtaatcaatgtttaatactgccgctaaagttctctaccgttcattgattgaactgactaataatcgattgacgtcttatctcattaaaaacttctgtgaatcgaaactgagcaagccgatgattccgctgttttccaaacactatcgcatcaactggaatgaaacggaacgtacggcttctgactttgattcactggcgtcatttttcattcgtgatattaatttaaatctccgccccgtggcaaaagaaaagaacgccatcgtcagtccggtggacggtgtcgttcagacggttggcatgattaaacccaatcaaactttcatggtaaaagggaaggattattcgttcgccgaactgacggggtttaaaagcgccgatcacaagtataacggcgggtgttttgccgtgctttatctgagcccgagacattaccaccgcttccattctcccgtcagctgcacgtatcagaagctggccgagctggggaaacgctcctatcccgttaatacgatggggttaaagtacgggaaagacgtgctctcaaaaaattaccgttatgtgtacgagctgacccgtgctgaccagcagatgctcatgattccggtaggtgcgatgaatattaactcgatcgttcagacaaacaccggaaacaggcttgagacgggggaagagctgggctatttttcatttggatcgaccgttattttagtattcgagaaagatatgtttaccccttcggataacctgactgaaggccgtgaattacaggtcggccagatcatcggttatgcggagtcacaggaggaggcgtccgctttataaaagctgctcctcttttttatatggtgtaaggaagtgaacattatggaagaaaaggatttggcaaagctgatagagcagtaccagcatacaggggatcagcaaattcttgaagccgtgcgggacgcatgccggcctgtcgttgaggcgctcatctcagaactggctgaagacagcgccgatcttttgcgggcaaaaggccgtgaccgttttccgtttattatcggcaagtatcagaccgcggccggcctttcgcttgagacctttttgcgcaatacgtatcggttttattttcagcaggttttaaaaggcgaagcgtgactggaagaaagagtacggacggaaatgttcatctttcgcccgttttcctgtatgatatagtagagtgtgcgatcattaatataattgaacagggtgtataaatcatggaaaaacaatatagagttttactttattataaatatgtaaagattgatgagcctgaggagttcacggctcagcatttgaagttttgtaaggagctcggtctgttaggccgtattttgatttctgaggaaggcattaacggtacggtgtccggaacggttgaacagacggaacaatacatgaatgcgatgaaagctgatccgcgctttgccgacatgccgatcaaaattgacgaggctgacggacatgcattccgcaaaatgtttgtgcgccataaaaaagaattggtgacgcttcgtctcgaagatgatgttgatccgaatgtcacgacgggcaagcatttgaaaccgaaagacttttatgagcaaatgcaggatcctgacacgatcgtgattgacgccagaaacgactatgagtatgatctcggtcatttccgcggagcggtcagacctgatattgaggcgttccgtgagctgccggactggattgaagagcataaagacatgcttgaaggcaaaaaaatactcacgtactgcacaggcggcgtacgctgtgaaaaattttccggctggctgctgaagaagggctttgaagacgtgtcccagcttgacggcggtatcgtcacttacggtaaagatcctgaagtgaaagggcaactgtgggacggacagtgctacgtgtttgacgaaagaatcagcgtaccggtcaaccgtgtagagcacgttatcatcggaaaagattatttcacgggcgagccgtgcgagcgttatgtgaactgcgcaaatccggcatgtaataaaaaaatgatctgcacacctgagaatgaatacaaatacatgcgcagctgcagtcacgaatgccgtacgaacgaacgcaacatgtatgtgaaagagcacgaaatgactcaggaagaaatcaatgaacgccttgctttgattgaacaagaggatcatgcggcgattgattaatagaaaagaccaccaataaggtggtcttttttgtgtttacatactttctgtccgggcggtctggtctgccgtgacgggtcctttatatttgaatgctttttcccacttggacacgacaatgcaggcgaccgcatggccgggcacgttaacgccggttctcgccatgtccatgacgcggtcgacaccggcaatgatggcgacgccttccgcggggagaccgacggcattcgctgtcgccagaagcacgacgagtgagcctgacgggacggcggcaatgcctttgcttgtcatgacgagcacaagcatcatcagaagctgctgagaaagcggcatttccacatgaaacgcctgtgccagaaaaatacaggacaccgataaatagaggcttgagccgtcacagttcagcgataaacctgacggaaccacaaaggagacgacccgcttcggacagccgtatttctccatccgatccatcagctgaggcagaatggtttctgtgcttgtcgtggagaaagcgatcaaaaacagatcccaaatcattttcagcacttcaaagtatttgattttaaagataagccccacgatcggaaacagaacgaagagtatcaggaacagcccgaggaacacagtgccgatcagcttcagcatcggaagcaaaagcgcgattccgaattgcccgacagaggcggccatcagggcgagaacgccgatcggagcggtgaccattaccatttgcgtcagcttgaacataatatttgccgtggattcgaagaaactcatgacaggtgcggaggctttgccgatgccggctgcggcaacaccgaataaaatcgcgaaaaaaatgacggcgagaagatcgtttttcgccatgacgtcaatgatgttaacggggataatatcaagaagcatttgtttcaggtcgactactttttccgtatagccggaaagctcgtgaatatcttttttagcaagatgagagaggttaagtccgactcccggcttcagcacgttcgccaataacagaccgagcgccagaacaagcgtcgtaatcacttcaaaccaaataatcgttttgatgccgagactgcccatctttttcatactgccgctgccggcggctccgataacaatggtcgaaaacacaatcggcacgacaatcattttaatcaggcggataaatccgtctccgacgggccgcagcgccatcccgaaatccgggaagaagtggccgatcaatgctccgatggctaaagcgatcaaaatctggaatgcgataaattttttcaagcgaatcccccttttacttgcgcatttcatacgtaattcgtgaagcaggcggcaaccaccttcctattcgccataaatttgtcacatgattgactgtgcgaaagaaaggattgctttacattatgtaagcgcaatcatttaatatgacagaaagtcctcattgaaaaaaatcaagcagaataaaataaagttagattttcgcttgaaaatatcaaaaattttgataattatcctcttataagtggtatatttgatatgatacggtcaactgcatcctcatatatctgtgcatacacgattcaggcagagaaaacaggcagcttacaaaagactgaaaatttgaacaattacaagaaaggtgtgcttttgttgaatcaactgattgaaagacgtaaggtcacagcaagaaaagaaaaaccggactccgcttcattggggtttggcaagtacttcacagattacatgtttgtcatggattacgaagaggagagagggtggcatgatccgagaatcaccccttatgaaccggtccatctggatccttccgcatcggttttccattacgggcaggccgtatttgaagggctgaaggcttacaggtcagaagacggccgggtattgatgttccgtcctgaccaaaatataaaacggctgaataaatcgttacggcggatgagcatgccgcctcttgacgagaagctggcgctggaggcattgatacaattggtggagctggagcaggaatggataccgatagaaaaaggaacctctttatatatccgtccgtttgtaattgcgactgagccttctttaggcgtccggccgtcaaagcgttacaagttcatggtagttctgacgcctgtcggttcgtactacggcgatcagctgaaaccgatccgtatttatgtggaggatgagtatgtgcgtgccgtcaccggcggagtgggcgacgtcaaaacgtccggaaattatgcggccagcttacaggctcagcggaaagccgaagaactggggtatgatcaggtgctttggctcgacggggtggaaaagaaatatgccgaagaggtagggagtatgaatatctttttcatcataaacggagaggccgtaacgccggcgttaaacggaagcattctcgggggcatcacacgcgcatctgtgatagagctgttaaaaagctggggcatccgcgtcagggaagaacaggtcgccattgatgacatctatgaggctgcgatgagaggcgaggtgtcagaggtattcggtacaggaaccgcggccgtcatctcgccggtcggcgcgctgcacattcacggagcaacgattgaactgaataacggtttgatcggtgaagtgtcagaaaggctctatgaaacgattgccggcatccaagtcgggaaggtgcgggattcgttcagatgggtggttgaagtataaatgaaaaaagaacccttgcgcgggactgacccccgtttttgagacagggatcaaaacacctttaagcagccagctgtcggtatgtgaccggcggctggttgtttagtttcgtttgaatacgaatgttgttataatagtgtatataggtttcgacagtttgttctacgatggtcgtcgtagtgctttccaacctgtcgaggtagaacgtttcagactttagtgaggaatgaaacgattcgatggaggcattatcagcgggcgtccctttgcgggacatgctcatggtaatgccttttgttttaacagctttctgatactcataagatgtataaacagaaccttggtcactatgtaacacacagttctctggcagtgcgggcagctgatcaagtgtgtgtaagacaaagtctgtgtcctgtctatcgccaatcgtaaaagcaatcacttctccattgtataaatccaatatactggaaagatacaattgtttctgcccataaggcaaatatgtgatatccgttactagcttttccagaggacgatcagactgaaagttccgatccaatgcatcctggggctgtagtcggtcccaagggttgggctgttcgcccattaaagcggtacgcgagctgggttcagaacgtcgtgagacagttcggtccctatccgtcgcgggcgcaggaaatttgagaggagctgtccttagtacgagaggaccgggatggacgcaccgctggtgtaccagttgttctgccaagggcatcgctgggtagctatgtgcggacgggataagtgctgaaagcatctaagcatgaagcccccctcaagatgagatttcccattccgcaaggaagtaagatccctgaaagatgatcaggttgataggtctgaggtggaagtgtggcgacacatggagctgacagatactaatcgatcgaggacttaaccaatttgaatgtatgcttactgttatctagttttgagagaacactctcaatggtttggtggcgatagcgaagaggtcacacccgttcccatgccgaacacggaagttaagctcttcagcgccgatggtagtcgggggtttccccctgtgagagtaggacgccgccaagctatcattacggtaaaggcagctcatcatgagctgccttttttgtttataagtattgcttcaggaaattagaaacgtaatacggaaattttcgttccgtgacctctaagaaccggcggatcatcacataatcatcactgacatgctgtgtcagcagttcataccaccactccgtttcatatctcgcaatcatcccgatattgtagaggaccaaataatgaataatcatttccggaagatggaggaagtgatcacgctgagagggaatgtaatattgatttttctctaagtgaaacaataaatttggcgaagaccaaggttctctgtctatcgggtcagcctcaaaaaccaagtggttatggtctttcctcagaaaagaccacttcaaatgatggctgatatattcagcaaagcgggaatcagacatattgtaatgaatcaccgcatgctcaggcactgaaataaggtcatctttgagctctactcgggtcagccaattctttttctcttggaagtaaaagacagtatgcaattcaggtatggctgtcagcaatttcttcattgtgtaccgttcttcctcaagaccagctatcccgaataagtgcttcattacatgaatacataagccattgcgctgcaccttcacttcatcatccctaaaggagtaattttgctttttgcgtttccgggcagtcacgccatgcgcgagtactgaggcatggcttggatagcttggatctgtggtcagaaggcaggctttcagcaattgtgacatcccgtaaaacaacagaataggcttaatttctaaaggggaaagagatgcctgcttataaaaggactcggcgtgtttgataaagaatatgaagcgctcactgttcttaaacgcatatcgttttggttcttccataccgctttctgtatagattttatttagaaatttctgggaagattctacggaataaaataatgataactctttccactcatgatctctcatatgtatttttaaaccctttcctttatctaaatatttcaactctttttcgcttccttgacatgctgttttctagttgataatctacatataatattttgccgaaaagagggggatttactaatgtgggaaagtaaattttcaaaagaaggcttaacgttcgatgatgtactgctcgtaccggctcaatcagacgtacttccgcgtgatgtggatttatctgttgaactgacaaagacgttaaagcttaatattcctgtcatcagtgcgggaatggatacagtaacagaatcagctatggcgattgcgatggccagacagggcggcttgggcattatccataaaaacatgtccatcgaacagcaggctgaacatgttgacaaagtcaaacgttctgaacggggcgttattacaaatcccttctttttaacacctgatcatcaagtattcgatgcggagcatttgatggggaaatacagaatttccggtgttccgatcgtagataataaagacgatcaaaagcttgtcggtatcattacaaaccgtgatcttcgctttatctctgattattcaatgaaaatcagtgatgtcatgacaaaagaagagctggttacggcttctgtgggaaccacattagacgaagcagaaaaaatcttacagaaacataaaattgaaaaacttccgttagtggatgaccaaaacaaattaaaaggtcttatcacgatcaaagatattgaaaaggttatcgaattcccgaattcatctaaagatgaacatggacgccttattgtcggcgctgcggtaggcgtgacaggcgatacaatgacacgcgtcagcaagcttgttgaagcgaatgtcgatgttatcgtggttgatacggctcacggacattccagaggcgtactgaacacagtcgcgaaaatccgtgaaacatatcctgaactgaacattatcgcaggaaatgttgcaacggctgaagcgacaaaagctctgattgaagccggagcaaatattgtcaaagtgggaatcggacctggttctatctgtacgacacgcgtcgttgcaggtgtaggcgtaccgcagatcactgccatttatgattgtgccactgaagcgagaaaacacggtgcgacaattatcgcagacggcggtattaaattctccggagatattacgaaagcgttggcttcaggcggacatgccgtaatgctcggaagtctgcttgccggtacttcagaaagcccgggagagactgaaatctatcaaggcagaagatttaaagtgtatcggggtatgggttctgtcgctgccatggaaaaaggcagtaaagaccgatatttccaagaagaaaataagaaattcgtccctgaaggtatcgaaggacggactccgtacaaaggtcctgtagaagaaacagtgtatcagcttgtcggcggtcttcgttcaggtatgggatattgcggttcaaaagacttgcgcgctttaagagaagaggctcaattcatccgcatgacaggtgccggacttcgcgaaagtcatccgcatgatgtccaaattacgaaagaatcaccaaactacacaatctcataattgttacaaataaaaaacatttgacagggtcgctgactctgtctattttttttatatcgagtgtgataaaatttatactgttgtgttttgaatttgaatatgtccttaacggcttaattatagatttaaaatgaatgacggaggtcgtaagattgaacatcacgaaatggaaacagctgttggtgtcattagtggtactggcactggccgcaacttgctttgttccaatgtctaaagcggaggcagccggcaatgacccgattgatgtcaacgcatcagctgcgataatgattgaggcttcatcgggaaaaattttatacagtaaaaatgcagacaaaagactgccgattgccagcatgacaaaaatgatgactgaatatctgcttctggaagccattaaagaaggaaaagtgaaatgggatcaaacgtatactcctgatgattatgtctatgaaatttctcaagacaacagtttatcaaacgtcccccttcgaaaagacggcaaatacacggttaaagaactgtatcaggctatggcgatttactctgccaacggagccgcgattgcagttgccgaaattcttgccggaactgaaacgaaatttgtcgctgaaatgaatgcgaaagccaaagaattaggcatgacaaactatgattttaaaaatgccacagggcttgtgaatgaagaccttcacggcaagcagccgcaaggagaaggcgttaaagaagagagtgaagtttctgctaaagacatggcgcttcttgcagaccgcctgatcactgattatccggaagttctcaaaacaacaagcatcgctaaaacgaaattcagagccggcactgatgatgaaatggacatgccgaactggaacttcatgttaaaaggtcttgtttctgaataccctggcgttgacggcttaaaaacgggttctactgattctgcgggatcttgttttacaagcacagcacagcggaacggaatgcgggtcatcacggttgtattagacgcaaaaggcaacctgcataccggacgttttgatgaaacgaaaaaaatgctcgattacgcatttaacagcaatttctccatgaaagatctttaccctgaaggctctcaagtaaaagggcacaaaacgattgacgttgaaaaagggaaagacaagcaagtcgatattgttactgacaaggcgctttctattcctgtgaaaagcggggatgaaaagaactataaagccgaagtgactttagataaaaaagaaatcacggctcctgtgaaaaagggaacgaaagtcggaacgctgacagttacatacaaaggcagtgacaaagactatggcttcctcaaatccaaagagttcagcgtgaatcttgtaacgaaaaatgatgtagataaagcaaactggtttgttcagatgatgcgcggcatcggcggattcttctccggtatctggaacagcgccgttgacacggtaacaggctggttttaagaaataagaaagagctctgatgaaagttagggctcttttgcttaatatactgaaaaaaccaaattattagtaaaaaaatgatatctatcttattcatctcgctgtaaaataagaatacccatatgaaatattgtatttctgggatacaataagagatagaaattatctaactatacattgactagggggaccaaataatggctcaaacaggtactgatcgtgtaaaacgcggcatggcggaaatgcaaaaaggcggcgtcatcatggacgttgtaaatgctgaacaagcgaagattgcggaagaggcgggagctgttgccgtaatggcgttagaacgcgttccggctgatattcgcgctgccggcggtgttgcccgcatggctgatccgacaatcgttgaagaagtaatgaatgctgtatccattcccgtaatggcaaaagcgcgtatcggacatatcgttgaagcgcgtgtccttgaagcaatgggagtagattacatcgatgaaagtgaagttctgactccggctgacgaagaatttcatttaaataaaaacgaatatacagtcccgttcgtatgcggctgccgtgatctcggcgaagcaacgcgccgtatcgctgaaggagcttccatgcttcgtacaaaaggcgaaccgggaacaggaaacattgtggaagctgtccgccatatgagaaaagtaaacgcgcaagtgcgcaaagttgttgcgatgagcgatgacgagctgatgactgaagctaaaaacctcggcgctccttatgaactgcttcttcaaatcaagcgtgacggcaaactgcctgtagtgaactttgctgccggcggagtagcgacgcctgctgacgcggcattgatgatgcagcttggcgctgacggcgtatttgtcggttcaggtattttcaaatcagacaaccctgctaaattcgccaaagcaattgttgaagcaacgactcattacacagactacaaactgatcgctgagctttctaaagaattaggcacagcaatgaaaggaatcgaaatctcaaatctattgccggaacagcgtatgcaagaacgcggctggtaaaaccataggagagctggaagcatgttaacaattggtgtacttggacttcaaggagcagtaagagaacatattcgttcaattgaagcatgtggttcaaaaggtgtcgtcattaagcgtcctgaacagctgaatgacatcgacggcttaatcctgccgggcggggaaagcacgacgatgcggcgtttaatggatacgtatcattttatggagccgcttcgcgagtttgccgcccgaggcaagccgatgttcggcacatgcgccggtctgattattttagccaaagagatagcgggaacggataacgctcatctagggctgttgaacgttgtcgtcgagcgtaattcctttggccgtcaggtcgacagctttgaagctgatctgacgattaaaggccttgatgagccgtttacgggtgtatttattcgcgcgccgcatattttagaagccggagaagatgttgaagtgctttgtgagcataacggacgcatcgtggctgcaaagcaggggaatttcctcggctgctcgttccatcctgaactgacggatgatcaccgggtgacagagctgtttgtgaagatggcggaaaagcataagcaggaaacagctgtataaaacagttgaaaaccgctgatacttatagtacattataaacacaaataaagatcgaaaagcgttgacaggaagcagtaggaagcctctctttcaaagagagccgatgggtggtgcgaatcggtgaaagatgctgtccgaatccgtccttgagcgaaatgctgaaaccaagtaggcatttacgggaaaaccgttatgtgttaaagcgggaagcaagtgtgagcttgttttcaatcagggtggcaacgcgagagctctcgtcccttttaggggatgagggctcttttttattttcgataaaaacagataggagttgttaggcatgattgatacgaaggtgctgagagccaattttcaagaggtgaaagcgaagctcattccaaaaggcgaagacttatctgactttgacaagtttgaagagctggacgaaaagagaagagagcttatcggtaaagtagaagaactgaagggaaaacgcaatgaagtatctcagcaggtcgccgttttgaaacgggagaaaaaagacgctgatcatattattaaagagatgcgcgaagtgggcgaagaaattaagaagcttgatgaagagcttcgtactgtcgaaacgacgctcgaaaccatccttctgtctattccgaacatcccgcacgattcagtgcccgtcggggaaacggaagatgataacattgaaatccgcaagtggggagaggcgccggcattttcatatgagccgaaaccgcattgggatatcgcagaccatttaaacattcttgatttcgaacgcgcttcaaaagtaacaggcagccggtttgtgttttataaaggattaggcgcccgcctcgaacgcgcgctctacaactttatgctggatcttcacgttgatgaatatgattacacggaagtcattcctccttatatggtaaaccgtacgagcatgacaggtacgggacagcttcctaaatttgaagaggatgcttttaaaatcagagaagaggattatttcttaattccgacggcggaagtgccgattacaaatatgcaccgcgatgaaatcttatccggtgagaacctgccgatcaattatgccgcattcagcgcctgcttccgttcagaagcgggatctgccggccgtgatacacgcggtttgatccgccagcatcagttcaacaaggttgagcttgtgaaattcgtgaagccggaagattcttatgaggagcttgaaaaactgacgaatcaagctgagcgggtgcttcagctgcttgaactgccgtatcgtgtcatgagcatgtgtaccggtgatctcggctttacagccgcgaaaaagtacgatattgaggtatggattccaagccaagacacataccgtgaaatttcttcttgcagtaactttgaggccttccaggcgagacgcgcaaacattcgattcagacgcgaagcgaaaggcaagccggagcatgtgcatacattaaacggttcaggtcttgcagtcggcagaacagtagctgccatcttagaaaactatcagcaggaagacggaagtgtcatcattccgaaagtgcttcgtccttatatgggaaataaagaagtcatcaaaccgtaaaaggtgcgccctagaggcgcgccttttttgctgcccggtatagagcggcggcattccgggctgtgctttcaaggttaaaacggccggatgctaaggcgtcttcaagacttacagcgccgggcacgatagaaaatacagccgttattcctgcgctgtaaacatgctcgaaatttttgcctaaggagcccgccaatgcgataacgggaatttcttgagcagatgcgcgtgcggcgatcccggcgggggttttgccgaatatcgtttgtccgtctatctgcccctctccggtaatgacaaggtcagcgcctcttatctgatctgagaaggacagtgtatctaatacaacatcaatcccgctttgaagttctgcctgtaagaaagcgatcagtccggcgcccagtccccctgcggcgcccgcgccttttacggtatccgcttcgataccgtgctgacgtctcaatatgtcagcgaaatggcgtaagttgcgatccaatacaactttagtcttctcggatgcccctttttgcgggccgaagacatatgaagcgccgttttcaccggtcaggggattttcgacatcacatgcggcacggatacggatatgtttcagttcaggagagagaccgcttatatcaatagaagctagggtgtgcagagcgcctccgccgtcaggtatctcctgaccttcctcatttaagaaacgcacaccgagcgcgctcgccattcctgttccgccgtcattggttgcgctcccgccaagtccgatgatgatctcacccgccccgcgggaagctgcatctgctatcagttcacccgttcctcttgtcgttgtgatcaacggatctctgagatggcggggaacgagatgaagtcccgatgcttccgccatttcaatgactgctgtgcgtccgtctcccagaagtccatatgcggcgtttaccggcattcccagcggaccggtcacagtttttttgatgatgcttccgccagtggcatccgtcaaagcctgaacggttccttctccgccatcggccgcgggtatcttgatatattccgcgtcagggaggaccgctttgaatcctttttctatgctgtcagcggcttcttttgatgtcatgctttctttgaaagaatccggtgcaataatgattttcattatgttctccacctttatgagcaggttatctgtttgaatctattcttgatttttactgtgttttcctgcccgtatggcatactgaggttgaattggacgcaagacttttgtatgatagtaaagctgacggacaagacgtttaagaaatgaaataaaaaatatgaaaaagcgcttgactgaaatttaggtcatgtgttatattattaaatgtcgatacggaggaatacccaagtctggctgaagggatcggtcttgaaaaccgacaggggtgtcaaagcccgcgggggttcgaatccctcttcctccgccatattgattttaaacctaatgaaactcgagcatatattggagattgttttgtccgctgcatgtgatgcagcggattttttatatgcaaaaaaagcgattttctctgtccggggaaaatcgctttgctatttttatttatttctgttttcgttgatcacgtgactgattttttcgatcaaaggttccagtgactgttcatcagcttcaaggtcataatcttcaatgcgtactttcagcacagggcaggcgttaaaaccgctgatccagtcttcgtaccgtgtatacatctcttcccaataggagcggtttgtctgcagctccatctcgcggccccgcttttcaatccggtttataatgttttcaaggtcgccttctaaatagatcaaaacatcaggatgggggaagtacggcgtcatgaccatcgcctcaaatagacttgtgtatgttgtgtaatctgtcagcgacatggttcctttatcggcatgcatttttgcgaatatgcctgtatcttcataaatcgaacggtcctgcacgaatccgccgcctgattcaaacatatttttctgctctttgaaccgctcagccagaaaataaatttgtaaatggaagctccagcgttcaaaatcgtgataaaacttctctaaataagggttttcatccacttcctcaagtgaggtatgaaacccgagccgttttgctaaagctttggtcaaagtcgattttccgactcctaccgttcctgctactgtgataatggcgttgtttggaatatgaatgtctttcatttaataagctcctttacctgacgggcaattctttcatagtctgtcttattcaaaacaaagtcttcagtatcaccgtcaatggtcagtacagatatatccggatcttcttcctgaagctgtctgatggctgtgtcgtaatctgcaatgagacgttccagatattgatgctcgatatttttctcaaacgggcgcccgcgtttttcaatgcgttgaagcaatgtcggcaggcttgcctttatgtatacaatgatattcggtttcggcaggtcgtgagtgagcagatgataaatctgcttatatttctcaagcttttggccgtgcaatgtacgctctgcgaaaataacatttttataaatatgataatcggacaatacgggctgtccttgttttaaataatctcgatcggtgtcctcaagctgtttatacctgtgacatagaaaaaacatttcaagctggaaactccactcctcgatattgtcataaaacttatcgagataagggttgtcttccacaatctcattaatcataggaaaaccgagctcttcagaaagcatcgtagcgagtgtcgtttttcctgccccgataggaccttctaccgcgataaaaggggctctgttcattgaaaatcctccttaattctgcaaacatccgtcagctgccggcctttatattgtatcacactctcagaaaagcccatgaaaaaagacgcttccatttaacgaaacgtctcttttacaatatgaaattgatcgttgagcaaaagccagttttgcgggaaagaaaggccgagtttccaatagctgattcctcttaaatgaagttctttaattaaattgaatttcgcttgaatggatcgtgcgtcttcaaaccatacttcatgccgtctctgattttcatccgtgtatcggaagaatggagcctgggcggtttcgtcatattgaatgtcgactttatagcgtgctgccagagcgattgcctgctgaggactgacggctttggctgtcgttccctgtttaaaaggcagtgtccaatcatagccgtacatattttggcccatgacgatttttgaagaaggcatttccgtcagcgcgtactcaatgacatttcttacagggccgataggtgatacggcctgagccgggcctccgctgtacccccactcatatgtcatgatcacgacaaaatcgacgatttctccatgtgccctatagtcatgtgcttcgtaccatttgccggcctgagtcgcgctcgttttcggagcaagcgccgttgaaatcttccagccttcccgatgaaaaatcgtcctcgcttcacgtaaaaaacgattgtaggcttctctgtcctgtggacgtaaatattcgaaatcaaagtgaatatcgcgaaagccgtactttttagccgtggagacgatttcctgaaagagttttgttttcactgtattgtcattcaagatgagccgcccgagttcatcgctgaatgcgtcattttcaaggttggtgatgatcatcatcagtgtggtgttgtgcctgtcactgatgctttttaaattggtcagaggcggttcctttaaagtcccgttccgctgcacttgaaaactgaatgcgccgaggtatgttaaataaggagaggcctcccttgccgcctgctggagattagcgcttacgctcgttccccgcggttctatatatgcatttgattcgatatcgggcttattcgcctgctgcggaatgtaaaggcgggttccggctctcaatgtggtgccgggctgaattccgttcaccctcgcaagctccgcggccgatatatgaaaacggccggcgattgcagcgagagtatcaccttgtttcacttcgtaatattgaccctcaatcgggatgacaagggtttgtccgacaaccaatgtatttggattaggcagtttatttgcttccgcaatgacatttgcggcagtccggtagcgcgccgcaatagcggaaagcgtgtcgccccgtttcactatatagatctgaatgaaaaacgcctcctttcatatccgctatcaaatatatgaaaaaaggaggctgatcatgtttatttttcggcggtaatttgtttttccgtggttatttctgcgaagagaacattctccatcatggtcaaagcgaaatcattgtcttcgtcgttattggaagcggtgcagtctttcggaatggcaatgctgtattctctcatataggcgtcgttggccgtgaacagcacacaaatgttcccggcaatccccgtgatgattaatcggttcacttgtaattcggtcagaagggtgtgaagcgccgtttcgtaaaaagcggaatgcttcggtttaatgagaaaataatcatccggctgaggcgaaatatcttttataatgggggcgcttctgtcgttgctgcattcctccctgatggcatcaatatcagccttccagagcccgtaatgatcattaatataaataatcggccagttgctttgttttgcatgcttctttaatgataaaatacgggggacaatttgtttggttttttcagcaagacgttcgcccatatcaaattgaaaattgttgatcatatcgacaatcagaagggctgtgttgttaggttcagacaataccggcaactcctttctgcgggggtattcctattttaacctttatgagacatgaaaaaacttaagaagagagctcgaacctatgaatgatgaatattatatgagagaagccataaaagaagcgaagaaagccgaagcgaaaggtgaagtgccgatcggagcagttcttgttctgcacgatgagatcgtggcgcgggcgcataatctgcgggagactgaacagaggtcgcttgcccacgccgaaatgctggcgatagacgaagcgtgccgtaagctggggacatggagacttgaggatgccgttctttatgtcactttggagccgtgtccgatgtgtgcgggagccgtcgtgctttcgagagtcgataaggtcgtattcggcgcatttgatcccaaggggggctgtacaggaacgctgatgaacctcttgcaggaagagcggttcaaccaccaagcggaagtggtgagcggcgtgctcggagaagagtgcggagaaatgctcagcgcttttttcagaaagctgcgccggcaaaagaaagacatgaggaaaaagttgtctgagtagtacggttgcattttctgcctgaagcagatatacttatgtgtgcatcatgaatggtgcgcatataaaaatttgatatttattttgccgtgctaagcggggaggtagcggtgccctgtacccgcaatccgctctagcggggccgaatcccttctcgaggttcgtttactgtaaggtctgccttaagtaagtggcgttgacgtctgggtcctgcgcaatgggaattcatgaaccatgtcaggtccggaaggaagcagcattaagtgaaacctctcatgtgccgcagggttgcctgggctgagctaactgcttaagtaacgcttagggtagcgaatcgacagaaggtgcacggtaaatcaatcatcaaatttcagactcacctgtttatggcaggtgagttttttcgtatatgaaaaacgggttttggcgttaaaagcacgttcatgtataataaacatgatgaataacagaggagggcgcatcctgtgggttaccaagctttatatcgagtatttaggcctcagcagtttgaagatgtggtcggacaggaacacattacgaaaacgctgcaaaatgcccttttgcaaaagaaattttctcatgcatatctgttttctggaccgcggggaacgggaaaaaccagtgcagctaaaatatttgcgaaagcagtcaactgtgagcacgcccccgtagaagaaccgtgcaatgaatgtgcggcgtgcaaggggatcacaaacggctctatatcagatgtgattgaaatagatgcggcgtcgaataacggcgtagacgaaatccgcgacatccgtgacaaagtaaaattcgccccgtcggccgtcacctacaaagtatatattatagatgaggtgcatatgctctctatcggcgcattcaatgcgcttctgaaaacgctggaagaaccgccggcacattgcattttcatattagctacgactgagcctcataagattcctttaaccattatctccagatgtcagcgttttgacttcaaacggattacatccaaagcaattgtcggacgaatgaagacaatcgtcgatgcagagcagctgaaggtggaagaaggagcccttgatatcatagcgagtgctgcggacggaggaatgagggacgcgctgagcctgctcgatcaagccgtatcattcagcggcgaggagctgtcggtggatgacgcattgctcattaccggagccgtttctcagcactatattgggaaactggcatctgctcttcaccgcaaacaggtttccgaggcattggagacactgaatgaattgctccagcaagggaaagatgcggccaaactgattgaagatatgattttctattttagggatatgctcttgtaccaggccgctcccggtttagaaggagtcctggagaaggtgaaggtcgatgaaacgtttcggaatctgagcggtgacataccggcccccgctttatatgagatgattgatatcctgaataaaagccatcaggaaatgaagtggacgaaccacccaagaatcttttttgaagtggctgtcgtgaaaatatgccagacggcacagcaatccgccggagacatccctgaggtcggcatgctgatgaataagattcagcagcttgagcaggaagtagaaaggctgaaaacctccggtgtgaaggttcagatggaaagcgctccgaaagaagctccgcgtcctcaaaaaggcggaaaaagccattacaaagctccggtcggaagaattcatgagatattgaaggaagccacaagacctgaacttgaacagcttaaaagcagctggggcaagctgctggcacacctgaaacagcagaataaggtgtctcatgcggctctgttgaatgacagtgaaccggtggctgctgctcaaaaggcatttgtgcttaaatttaaatacgaaatccattgtaaaatggttgcagaagacaataacggagtccgtacgaatcttgaacagattctcgaatcaatgctcgggaaaagaatggatttgattggcgttccggaagcacaatggggtaaaataagagaagaatttttaaatgatcaccagcaggaaagtgaaggatcaaacgaaccggctgaagaagatccgctgattgcagaggcgaaaaaacttgtcggagcggatttaatcgaaataaaagactaataagatgaaagagagtgattgaatatgcgtggcggaatgggaaacatgcaaaaaatgatgaaacaaatgcaaaaaatgcaaaaggatatggcgaaggctcaggaggagcttgctgaaaaagtgcttgaaggcacagcgggcggcggtatggtgactgtaaaagtcaacggccaaaaagaagttgtagacattgccattaaagaagaagtcgttgatccggaagatatcgaaatgcttcaggacctggttcttgctgcgacaaacgacgccctcaaaaaagtggatgacatgacgaatgagacaatgggacaatttacaaaaggaatgaacataccgggtttattctagggggataaataaacatgcagtatcctgaaccaatatcaaagctgattgacagctttatgaaattgccagggatcggaccgaaaacagcggttcgtctggctttttttgttctaggtatgaaagaagacacagtattggattttgctaaggcgcttgtcaatgcgaagcggaatctgacatattgctcgatttgcggacatataacagatcaggacccttgttatatatgtgaggacacaagaagggataagtctgttatttgtgtcgtgcaggaccctaaggatgtgatcgcaatggagaaaatgaaggaatataacggccagtatcatgttcttcacggcgcgatttcaccaatggacggcatcggcccggaggatattaagattccggagctgctgaaacgtcttcaggatgatcaagtgacagaagtcattctcgcaaccaaccctaatattgaaggggaagcaacagcgatgtatatatcaaggctgttaaagccctcaggcatcaagctctcccgtattgcccacggtctgcccgtcggcggtgatttggaatatgctgatgaggtcactctttcaaaagctcttgaaggaagacgtgaattgtaagggaggaaaaagcaaggcatgggttttcttcgcagaaatacattaagaaaagagtttgatgagaagctgatagaacagctctttaaacaaaaagaagaatggaacagacagaagagtctggtcgagaaaagtctcgagccctccgctgaggtgttgtttgagctgaaagtcgctgaatctaagtactttttttatttgaaagaagcgaagcagcggaatttgaaaatgagcagatggaagtaagaggtctattctccgggatcttctcataagcttgtactaaacaagcgagggggaagattcatggagccttttttcattatcggtttgattgtcggtctggttgctttgctttttttatggggagtatcttcaaaaccgttaagatggattggtgtgactgcgattaagtttattgccggtgcgattctgctggtgggtgtgaacttgttcggaggcagtctcggtattcatatccctgttaacctgattacaacgggcatcagcgggattctggggattcccggcatcgcggctttgatagtcattaaacgcttcatcatttaatttatcgattattgttgacatgtagaatcaagggtggtattctaatatacgtcgctgatgacgaaacgaattctaaaaaagaaattttaaaaagttgttgacgacattgaagttgatatgttacaataattaagtcgcttcaagagcgatgaacaaagttctttgaaaactaaacaagacaaaacgtacctgttaattcaaagttttaaataaatcgcacagcaatgtgcgtagtcagtcaaactactttatcggagagtttgatcctggctcaggacgaacgctggcggcgtgcctaatacatgcaagtcgagcggacagatgggagcttgctccctgatgttagcggcggacgggtgagtaacacgtgggtaacctgcctgtaagactgggataactccgggaaaccggggctaataccggatggttgtctgaaccgcatggttcagacataaaaggtggcttcggctaccacttacagatggacccgcggcgcattagctagttggtgaggtaacggctcaccaaggcgacgatgcgtagccgacctgagagggtgatcggccacactgggactgagacacggcccagactcctacgggaggcagcagtagggaatcttccgcaatggacgaaagtctgacggagcaacgccgcgtgagtgatgaaggttttcggatcgtaaagctctgttgttagggaagaacaagtgccgttcaaatagggcggcaccttgacggtacctaaccagaaagccacggctaactacgtgccagcagccgcggtaatacgtaggtggcaagcgttgtccggaattattgggcgtaaagggctcgcaggcggtttcttaagtctgataaaagctaccccggggataacaggcttatctcccccaagagtccacatcgacggggaggtttggcacctcgatgtcggctcatcgcatcctggggctgtagkcggtcccaagggttgggctgttcgcccattaaagcggtacgcgagctgggttcagaacgtcgtgagacagttcggtccctatccgtcgcgggcgcaggaaatttgagaggagctgtccttagtacgagaggaccgggatggacgcaccgctggtgtaccagttgttctgccaagggcatcgctgggtagctatgtgcggacgggataagtgctgaaagcatctaagcatgaagcccccctcaagatgagatttcccattccgcaaggaagtaagatccctgaaagatgatcaggttgataggtctgaggtggaagtgtggcgacacatggagctgacagatactaatcgatcgaggacttaaccaatttgaatgtatgcttactgttatctagttttgagagaacactctcaatggtttggtggcgatagcgaagaggtcacacccgttcccatgccgaacacggaagttaagctcttcagcgccgatggtagtcgggggtttccccctgtgagagtaggacgccgccaagctatattatggtaaaggcagctcatcatgagctgccttttttgtttttgaataaaaacaaaacaaacaccgaaatacggaaacgcccatatactaattgcaaacttcaaaaaggtccaaattgtgtatacaatcaacagcttaagggaaggctattcatacggaggtgggcaaaatgaatgaaacgtccagccatgaagaaacatgtattgtgtgtgaaaccaaaaaaagcaggggaatccatatttatacgaaatttatatgtttagagtgtgagaagaaagtagtttccactccgacctctgatccaaattatgaatttttcgttcgtaaactgaaaagccttcatacaccgacgttatattcttaaccctgaaaagggtcttttttttgcctgaaatcagaggagtttttacactttttataaaagaactgatacgataagaagaggaacttgtttagacatggaatgtaatagataatactgataaaagtgaataaataggagtcgatcaagtatgaaaccgtttattcaatatatgaaatggacgctttgcggcagcacagtttttgtattagcggggataaccttctttacgatagggcatcagccttttttgtattcgtttttatacggggcagccagcggagccgcagccagtgcggccggactatggaatgcgaagcgtctctttttaaaaaaacaccggctgacaagaaaagaatatgcttatatcaaggaaaatcttgaggaagcaaagggtaaaatcatccgattacgcagggcgctttttcgctctaaaagtatacaaatgctgaagcagaatgcagagatactgcggataacccgacgaatatatctgctcacaaagcaggagccgaagcgtttttatcaggcagagcgtttctattatcaaacgcttgattctgttgcggaactgacggaaaagtatgctctgctctcctcacagccgcgaaaaaataaagatttatcaatgtccttgagtgagacgaggatgactctggcagagctctccagaaggctggaagaggatcttcatgaactgatgaaggaggacatcgacgacctgcactttgaattagatatggcaaagcattcactgagaaaataagaaaggaagaaggaaatggccaaagaccgttccgacgacagcatgggcgcccaaaatgaccagacccctctaaagcatgcagatacgctgccggaagaaaaaagagaggcggcacttcagctcgctgaaaaactggaccctgagaacatgcaaagcattgttctgtttggttcacaggcgcaggcgaatcttctggaattttcccatacgatgatagagcacgtgcaaagaaaagatgcaggagagatgggacaaatattggctgatctgatgatgaagcttgaccaggtaaaccctgatgatctgcagatgaagaacaaagggtttttcgcccggctgtttaaaagggtatccggttctgtgcaggaagtgctttcgaaatatcaaaagacaagtgtgcagattgaccgtatcagcagaaggctggaacattctaaaaatgtgctgttgagtgacaataaattgttagatcagctgtacgcccaaaataaacaatacttttctgatttaactatgtatatagcagcgggggaattaaaattagatgagctgaaaacaaagatgatacccgaagcggcaagaaaagccgaattacaagaacacaatcaaatggccgcgcaggaagtgaatgatcttcgccagtttgccaaccgtctggataagagggtgcatgatctgctgctgagcaggcagattacgcttcagagtgcgccgcaaatccgcctgattcaaaacacgaatcaggcactggcagagaaaattcagtcctccattgttacggctattcctttatggaagaatcaagtcgccatcgcgctgacgcttatgaggcagcggagtgcggcagatgtgcagcagaaggcggcggatacgacaaatcaattgctgctgaaaaacgctgaacttctgaaaacaagtacagtcgagaccgcgaaagccaatgagcgcggacttgttgaggcagaaaccctcaaaaaagtgcaggaaagcttagtcagcacacttgaagaaatcatgtctattcaagaagaaggcaggatgaaacgcaggcttgccgagaaggagcttgttatcatggaaggcgatttaaaaaagaagctgcttgatatgaggtccggccgggataacggctagatggcaaaaagtcttagctttaagttggctcgcaggcacgatataataagaaagacaggcaaaggatttgtttaaaaatggacacacctttatatacagcgctgatgaagcatgcgcaccgaaatacgtattcttttcatgttccgggacatcacaatggagatgtcttttttgatgaagccaaatctgtatatcaatctcttttatctattgatatgactgagatcacgggtcttgatgacttgcatcacccgacgggggtcattaaggaagcgcaggatttggtgagcagattttacggctctcaggaaagtttctttctcgtcaatggaacgaccgccggcaatctggcgatgattttagctgtttgtgaaccgggtgaacccattctgatccagcgtaattgtcacaagtctgttttccatgcggcggcattggccggagccaagccggtttatttggcgccggaaatcgatgaaaacatgcatgtgccggcacatgtatccctttcagtcatcgaaaaagcgctggcgtcatatccgaaggcgaaaggacttgttctgaccaatccgacttactacggacacgccgccgatttgaccgcggcagttaacaaagcccattcatacggcgttcctgtactggtggatgaggctcatggggctcactttgtgttaggccagcctttcccgccttcatcattggctatgggggcagacgccgttgttcaatcggctcacaaaacacttccagctatgacgatggggtcttactttcatttgaacagcaccagaattgacagagatcgattaacttattatgtaagcagtttgcaaagcagcagcccgtcatacccgattatggcatctttagatacggcgcgcgcttatgtgcaggatattgctgaaaaagggacacttcccgttcatatggagcgcattgagaaaatcaaacgaaagttcgcatcaatttcttctattgaaataatcgagccttccggatatgggctgcgggcggacccgttaaaattaattcttcggtcaaagctcggacattccggctattcattacaacggattttggagagtgaaggcattgttgccgagctggctgacgagtaccaagtattgctcgtactgccgataggcggccggcggatgatagaacaggcaaccgtaagaaacatacagcagaaactggaggatacaccgcccgataaattgccggatgccgtgaattggacatttccgtccatttcgacacttgaatatccgcaaaatgagatgcggaagtttacaaaagagcctgcagatataaataaggcggccgggcgcttgcatgcgggcaacattattccttatccgccgggaattccgctgatcatggacggagaacggataacagaagagatcgtacaaaagctttcccgtttaatcggcatggacgcgcatattcaaggcttgttaaacggggaacaattacttgtctatatagaagaggagaaatcatgagcggtttatttataacatttgaaggtcctgaaggtgcagggaaaacgactgtgcttcaggaaatgaaagagattctgtcggcagaggggctcccggtgacagcgacaagagaaccgggcggcatcgacattgcggaacagatcagagaagtgatcttaaataaaaacaatacactgatggatgcaaaaacggaggcgctgctttacgctgcggcgagaagacagcatttagtcgaaaaggtgcagcctgcattgaaagaaggccgcattgtgctgtgcgatcgtttcatcgacagttcgctggcttaccaaggctatgcgagagggctcggcattgatgaagtcctttctattaaccagtttgcaatcggcgatacgatgcctgatgtcaccatctatttttctattgagccggaagaagggttgaaacggattacgtcgaatgattcaagagagaagaatcgtctcgatcttgaggccctgcactttcacacgaaagtacgggaaggataccaaaaggtaatgcagcgttttccggaaagattccatacaatcgacgcatcgaaaaagaaggaactcgtcattcaggacgcacttcaagtgataaatgaagcattgaaaaaaattcagttgtgacctgtttctcataagttgctataatgaatgtaacgataatgttctttccaacctaaagggggcctagagaatgaaactaatagtggcagtggtgcaggatcaggacagcaacaggcttttgaaagtattaaccgaccacaacttcagggtgacgaagcttgcgacaacaggcggattccttaaatcaggcaatacgacgtttatgatcggggtggaagatatccgtgtcgataaagcgctcagcctcattaaagagaatggctgtaaacgtgatcagatgattgccccggtatccccgatgggcgggaatgcggattcctacgttccatatcccgtcgaagtggaagtcggcggagcgacggtctttgtcctcccggtcgatgaatttcatcaattttaaggatttgacgacgtgaaaataaattctgacttacgtacatttattgagaaaaagcagcagcctgcttataaagcggcagagctttccggaacatttaaaagttcaatggacagccaaagcagcaagctgaaatttgatcagctgagcaggttcttaacggatatagaaacgttcgggaaaaggctgacgaagtcgagaaacttcaaagacttagcgaaattcaaaggattggtaaaacgttttgtaaaagaggccgtagacagcggattatcgcatgagacggagaaaagctttgacctgtacggcagcagccggactctggggcttgtgaaagaaatagatgaaaaactgcttcagctgacggaagaaatgttagatcaggaaaaaccggcaattgatttgctggatcgaatcggagaaataaaaggtttattgattaacctttacacatagagagtgatacaatggcaatatcatggaaggaaatgaccgggcagcagcccagagtgatgcggcttttgcataacagcattgaaaagaaaaggctttctcacgcatatctgtttgaaggcaaaaaaggaacgggcaaattggatgccgcactgcttctcgcaaaaagctttttttgccttgaagacgggactgagccttgcggggagtgccggaactgtaagcgtattgaatccggaaaccatcccgacctgcatgtggttcagcccgacggattatccattaaaaaggctcagatccaatcgcttcaggaagagttttctaaaacaggactggaatcgcataaaaagctgtacattatatcccatgcggatcaaatgacgacaaatgcagcaaacagtctgctgaagtttttagaggagccgagtcaagacaccatcgcaattcttattactgagcagctccaccgaatactggataccatcgtttcgagatgtcaggttcttccgttccagccgcttcagccgaaagccatagaagaaagactgattgaacaggaagtgagccctcacatggcccggctcttagcaaatatgacaaataatattgcggaagcagtcgaattaagtcgaaatgatgagtttgcagagtccagagcgaaagtgataaaattgtatgaagtcttacatcagcggaaaggacatgcctttttcttcattcaggatcagtgggtgccctttttcaaagaaaaaacccatcaagaaatgggtcttgatatgctcttattgatataccgtgatgtattatccatccaaattggaaatgaagataaactgatttatcaagacttattccaatcaataaaacagcatgcgctgcaatttacacaacaaagcgttacgaaccaaattctcgctgttttagaagcaaaaaaacggcttcattccaatgtgaatgtgcagggattaatggagcacttggtgttaacgttgcaggagggataagcttgtacaacgtaataggcgtccgctttaaaaaagcggggaaaatttattattttgatccgaacggatttgatatagaacaagacagctgcgtcattgttgaaaccgtaagaggtgtcgaatacgggcaggttgtcatcgcaaataaacaagtggacgagcatgatgttgtgcttccgcttcgaaaggtcatacgcgttgctgatgaacgcgatcttctcattgtagaagaaaacaaacaggaggccctgtccgcttttgaagtctgtcagaaaaaagtggctgaccacggcttagatatgaagctggttgatgttgagtttacatttgaccgcaataaagtcattttttactttacagcagacggacgggttgatttcagggaattggtcaaagacttggcttctatctttaaaacgagaatcgaattgcgccaaatcggggtgagggacgaggcgaaaatgctcggcggtatcggaccatgcggaagaatgctttgctgctccacgttcctcggtgattttgaaccggtgtccatcaaaatggcgaaggatcaaaatttatcgttgaacccaacgaagatttccggtctgtgcggccgtttgatgtgctgtttgaagtacgaaaatgatgagtatgagacggcaaaagaacagctgccggatttaggcgaaatgattacgacggcaaacggccccgcaaaggttgtcggtcttaatattctggaacgggtgcttcaggtggaactgaagaatcgtgaaaaagtgatagaatatacttgggaagagctcttggaagagggcgtcgtatccgcacaaaccacagattaacgaggtgtggaaccttggataaaaaagagttatttgatactgtcataaacctggaggaacaaatcggttcgctgtaccgtcagctgggtgacttaaagcagcatatcggcgaaatgattgaagagaatcaccatcttcagcttgaaaataagcatttgcgtaagcggcttgatgacacgacagagcaaattgaaaaattcaaagccgatcagaaagaaacaaaaacacagaaggcagagcagagtgatataggagaagggtacgacaatctggcccggctgtatcaagaaggctttcatatttgcaacgtccattatgggagcgtccgcaagggagattgccttttttgtctgtccttcttaaataaaaaataaggaaaaggcttccgctgatgtcggaagcctttttcaaagagtgccgaaaggaataagattatggtttcattacgtgatgatgaaagattggattacttattagcagaggatatgaaaatagtacagagtccgacggttttcgctttttcattagatgccgtgctgctgtctaagtttgcatacgttccgattcaaaagggaaacatcgttgatttatgcacggggaacggcattgtgccgcttttgctcagcacaaggtcaaaagccgatatcaccggggttgaaattcaggaacgcttgtatgatatggcgctccgaagcgtggaatacaacgggctgggcggtcagatcagtctcattcatgatgatctgaaaaatatgccggaaagactcggacataataaatatgatgttgtcacctgcaatccgccttattttaaaacaccgaaagaggcggagcagaacctgaacgagcatctcagaatcgcaaggcacgaaatcctttgcacgcttgaagatgtgatttccgtcagcagcaaactgctgaagcaaggcggaaaagcggctatcgttcatcggccggggaggcttttggaaatctttgaattaatgaaagcgtaccgaatagaaccgaaacgggttcagtttatttatccgaaacaaggtaaagaagcgaataccattttggttgaaggaattaaaggcggccgccctgatctcaaaattcttcccccgctgttcgtatacaatgaacaaaatgaatatacgaaagagatccgcacgattttatatggagacaaatagtcatttcttttatgtgctgctgtgcaatgacaacagtctgtatgccggttatacaaatgatctgcaaaaacggctgaaaacccacaatgagggaaagggcgcgaagtacacaagggcgagaaggccggtttcgttatgtcatgcggaatcatttgaaacaaaacgggaagcgatgcaggcggaataccgttttaagcagctgacccgaaagaaaaaagagcaatatatagaagaaaaacgacgcagcaaggaggctgtatatgttaagacgccagatgagttttaatggaaaatcagaaatgggaactctgtaccttgttcctacaccgatcggcaatttggaggacatgacctttcgtgcagtagagacgctgaaatcggccgatgtcatagctgccgaagatacgagacagacgaaaaagctgtgccatgtttatgatatagaaacatctctcatcagctatcatgaacataataaagaaagcagcggccataaaatcattgaatggctgaaaagcggaaagaatgtggcattggtcagtgatgccggcatgccgacaatttccgacccgggggctgagattgtgagagatttcacccaaatcggcggatatgtcgttccgcttccgggtgcaaatgcggcattaaccgcgctgaccgcatcaggcatcaccccgcagccatttttcttctacggatttttaaacagacagaaaaaagaaaagaagaaagaactcgaaatcctgaaaaaacggcaggaaacgatgatattttacgaagcgccgcacagattaaaagaaacattaacagcaatgcatgacgttttgggtaatcgaaccatcgccgtcacgagagaattaacgaaaaagtacgaggaattcatcagaggaaccatcgccgaggtgatggaatgggcaaatgaagatcaaatccgcggtgagttctgtctcgttgtcgaaggaaatcaaaccgctgaaccggaggaagaggaaaagccttggtggacggagctttctgagaacgagcatgtggagcattacataaacgaaggagcatcttccaaacaggccataaaacaaacagcggtagatcggggcgttccgaaacgcgagatttatgacgcttatcacattcaatcataaaaaaaaccgttcttgtatcgtaacaagaacggtttttgtatgaaatagcttatttttggttttgaagctggttttgaatttcagagataatttgctcagcgccttctttgctgagtaccaatttgccgccggcaagtttaaggttatcatcagaaacttcaccagttacttggcaagtcatgtttggtttatattttttaaggatgattttttcatcatcaacataaatttcaagagcgtctttttctgcgatgcccagtgtacggcgaagttcgatagggataacgacgcgtccaagttcatcaactttacgtacgataccagtagatttcattaacagtctcctcccgagagataattattttgtagtttatatttttcttcgtcattattcgacaaaattccttacattcctagcataacaaggtttccaataatcgtcaatctttttgtttactattgattgtaagaattagttcttatagtaagtaaagccttggaaatcctgaaataacaggctttttgactgctttttcgaacctattatcctactgaaaatccttttaaatcaagactttcgaaccaagatgttttatattagtagattatatacgacaaatttcgacatgttaagactttttttaatttcaataaaaatttttaattttatttactcttttacgcgcagtacgtatatatccttgatcttaaaggctaagatggtatcatagatagaggacaaatatcaatattgtatatcaaataaaaccgctctcgtcctttgggcgtgagcttttcgacattctgaatgggaggttgcaacatgccgcaagacaataatactttttatattacgaccccgatatattatccgagcggaaaattacatatcggccatgcttatactaccgtggccggcgatgcgatggcgcgttacaaaagattaaaaggatttgacgtacgctacttaaccggaacggatgagcacggacagaaaatccagcagaaagcggaggaagagaatatcacgcctcaagcttatgtagatcgtgcagttgctgaaatccaaaaactatggaagcagctcgacatttctcacgatgatttcatccggacgacggaaagccggcacaaagaaattatcgagaaagtgtttcaaaaacttcttgataatggtgacatttacctggatgagtatgagggctggtacagcatccctgatgaaacattctatacggaaacacagctggtggatgtggaaagaaatgagaagggtgaggttgtcggcggaaaaagcccggacagcggccatccggtcgaattaatcaaagaggagtcatacttcttccgcatgagcaaatacgcagaccgcctgctgaagttttatgaggaaaatccttctttcatccagcctgaatcacgcaaaaatgaaatgattaacaacttcattaaacctgggcttgaagatttggccgtttccagaacgacgttcgactggggcgtaaaagtgccgggaaatccgaagcatgtcgtgtatgtatggattgacgcactgttcaactatattacagcgctcggttacgatacggaaaatgatgagctttacaaaaagtactggccggctgacgtccaccttgtcggtaaagaaattgtccgttttcataccatttactggccgattatgctgatggcgcttgatctcccgctgcctaagcaagtcttcgcgcatggctggttattgatgaaagacggaaaaatgtcgaaatcaaaaggaaatgtcgttgatccggtaacgttaattgaacgttacggcttggatgaacttcgctattacctgcttcgcgaagtaccgttcggttcagacggtgtctttacgccggaaggtttcgtagaacggattaattatgacttggcgaacgacttaggaaaccttctgaatcgtacagtcgcgatgatccaaaaatattttgacggtgagattggttcatatgaaggaaatgtgaccgattttgattcagagctttcttctgtagccggtgaaacggttaaagcttatgaaaaggcaatggaaaacatggagttttcagtcgctttatcaacgctatggcaattaatcagccgtacgaacaaatatattgatgaaactgctccgtgggtgcttgctaaagaccaggaaaaagaaaaagaattacgttctgtcatgtatcatttagctgaatctttacgtatctcagccgtattgctccagcctttcttgacacaaacgcctgaaaaaatgtttgcccagctcggagttgaggatcagtctcttaaagcatgggacagcattcagacattcggccaattgaagaacgcgaaagtgaaaaaaggggaaccgcttttccctcgtcttgaagctgaagaggaagtagcttacatcaagcaaaaaatgcaaggaactgctcctgctaaagaagaaaaggcggaagagccgcaagaagcagagcgtcttcctgaaattacgtttgatcaatttatggatacagaacttcgcgtcgcagaagtcttgtccgcagagccggtgaaaaaagcagatcggctgctgaaattgcaaattgatctgggctttgaacagcgccaagttgtatcaggtatcgcgaagcattacacaccggatcagcttgtgggaatgaagatcatttgtgtaacgaatctaaaaccggtaaaactgagaggcgagctttctcaaggaatgatactggcaggagaatcggacggcgtactaaaagttgtagctatcgaccagtcattaccgaaaggcactcgaattaaataatagatgcaaaaggtgtttcacgtgtaacattccgtcgaacaccttttgtttttcaacaagaaaggagtttttatgatgctttttgatacacatgcgcacttaaatgccgagcaatttgacacagacttagaggaagtcattgcgcgtgcaaaggctgaagaagttgaacgaatcgtcgttgtcggcttcgacaaacccactatcacgcgtgcgatggagctgattgaggaatatgactttatatacgctgcgatcggctggcatccggtagacgcaattgacatgacagaggaagatttatcatggattaaggaactgtcctctcacgaaaaagtcgtggcaatcggagagatgggccttgattatcactgggataaatcaccaaaagacgttcagaaagaagtattccggaaacaaatcgctctcgccaaagaagtgaaccttccaattatcattcataatcgtgatgcaacggaagatgttgtcacgattttgaaagaagagggggcggaagaagtcggcggtattatgcactgctttacagggagcgcggaggttgcgcggcagtgtatggatatgaatttttatatttcattcggcggaccggttaccttcaaaaatgcgaagaaaccaaaagaagtagcaaaggaaattccgaatgaccgtttgctgattgaaacggactgtcctttcctgacaccgcatcctttccgcggtaaacgaaatgagccaagctacgtaaaatatgttgctgaacagctcgctgaattaaaagggctgacatatgaagaaattgcctcaattacaaccgaaaacgcaaaaagacttttccgcataaactgacagaatgcgctgtcgtaacgtgtaaaggcttgtccgattcagtggatatgtaaaacggttctacaagcttccttctcctcataagataggttgtcgatatgtctctcttcctttttttgctttgtttttgcataatgagggatacgctgaaggtttttcatcttcgagatgggagggttgacagcattttagatactctatataatctctccgaggagaaggaggcgtttttcatcacacaaaaaatgaaaaaactgttttccgtaaagcttggtaaaagcaaggttattcttattgcagctattattctgctgggcggaaccgggactgcatacggggcacatgagctctcaaaacaatcagtttctgtttctatcaacggcaagaaaaagcaaatacgcactcatgcaaaaacggttggggaacttctggaagatttacatatagagacgagaaatgaagaccggattaccccgtctaagcagacagcattggcagacaacatgaatgtcgtgtatgaagctgcaaagcagatccgtgtgacaagaggcggagaagaaaagactttatggtcaacggcaaaaacagtcggcgcatttctgaatgaacagcatacacctgtgaatcagcacgataaaatagatccagcagcagatacgaaagtgacaaacggcatgaaagtcacggtcgacccggcttttcaggtcactgtaaatgatgcgggaaagaaaaagaaaatatggacgacttcgactacggtcgctgactttttaacgcagcataagatggacatgaaagacgaagataaagtaaaaccggcattacacgaaaagctcacaaaaaatcaggccggcatacaaatcactcgtatcgaaaaagtcaccgatgtagttgaggaaaaaatagcgtatcaagtgaaagaaaaagaagatgcgtctctcgacagcgggaaagaaaagatcgttcaaaaaggaaaagaaggcaaacttaaaaagcattttcatgttgtcaaagaaaatggaaaagaagtttcaagaaagcttgttaaagaagaaacatctgaaaaaagcaaagatcaaatcattgcggtcggcacaaagcggcacagtcccaagattgagcagctcagtgcacctgtgaaggcatcttctggcgaaaccggatcttccggtaaagtgattaccgtgtcttccacggcttataccgcaagctgcagcggctgttccggccatacggctacaggcgttaacctgacaagcaatccgaatgctaaagtcattgcggtagacccaagcgtcattccgctcggcacaagagtccacgtagacggatacggggatgccgtggccgctgatacaggctcagccattaaaggaagacggattgatgtctttttccctgaaaaatcttcagcttaccgctggggaaagaaacaggtcaaaataaaaatcttaaattaattccgattcactcagagggttttgcgccctctgtttttttcgttataataggtaaagtgtattttcagtatattagacgtgacatgtaagcaaaggtttcgttttggatataaaaagtttttttggaggaagtaatgaaaattaaagaaattattgtagtcgagggacgcgatgacactgcgcgcataaaacttgccgttgatgcggatacgatcgagacaaacggttccgcaatcggagacgaagtcatcagacagattcggctggcgcaggaaacgagaggggtcatcgtgctgacggacccggattttccgggggaaaagatccggaaaaccatttctgaagcagtacccggctgtaaacacgcatttctgcccaaacatcttgccaaaccgaaaaacaagcgcggcattggcgttgagcacgcatccattgaaagcatcagagcatgtctggaaaatgtgcatgaagagatggaggcaaagccgagtgagatttcagctgaagatgtcatacaggccggtctgatcggcggaccggctgccaaaagacgccgcgaacgattgggcgacctgctgaagatcggctatacaaacggcaagcagcttcaaaaacggctgcaaatgtttcaaatcaaaagaagtgattttattgatgcgctcgatgctatgaggcaggaggaacaggatgaacaataaagatatcgcgacacctatcagaacgaaggaaattctgaaaaagtacggtttctcttttaaaaagagtctgggacagaatttcttaattgatacaaatatattggacagaattgtggaccatgcggaaattacggatcggaccggagtcattgaaatcgggcccggaatcggcgcgctgacagagcagcttgccaaacgggcgaaaaaggtcgtcgcgtttgaaattgatcagcgcctgctgcccattctcaatgatacgctgtctccatatgacaatgtaacgatcattcatcaagatgtgctgaaagcagacgttaaatctgtcattgaagagcattttcaggattgtgatgaaattatggtgacggcgaatctcccatattatgtgacgacgccgatcatcatgaagctcttggaagaacatcttccgttaaaagggattgtcgtgatgctgcaaaaagaggtcgctgagcggatggccgctgatccttcctctaaggagtacggatcgctttccattgcggttcagttctatacggaggccaaaaccgtcatgaccgtcccgaaaacggtgtttgtgcctcagcctaatgtcgattccgcggttatccggcttttactgcgtgacggcccggcggttgacgtcgataatgaaccgtttttcttccagctgattaaagcaagcttcgcacagcgccggaaaaccttgctgaacaaccttgtgaacaatcttccgggcggaaaagaaaaaaaagctcaaattgaagaagttcttcaagaaacgaatattgacggaaagcggcgcggtgaatccctgtccatagaagaattcgcgctcctgtccaacggattgcataaagcccttttctaagagggctttttgttttgcgtcaccacttggactgccgctacataggctagaggagaaccttattcattcaactgcaagaaaagcttgaaacatcaagcgccgcagcggaaagaggtgtatttgccaagacttctttcatgatgaggcttagtctatttgtggagtgggtaacgtgcaatttcaaataggagatatggtagccaggaaatcctatcaaatggatgttttatttcgcattatcggtatagagcaaacaagcaacggaaattcaattgccatcctgcatggtgacgaagtcagattgattgcggatgctgatttttctgatttggagcctgtcagaaaagacgaacaggccatgagaaagaaaagagatgaaagcaggatgaatgaatctctcgagctgctccgccaggattataagctgcttcgggaaaaacaggaatattatgcgacaaatcaatatcagcatcaggagcactactttcatatgcccggaaaggtattgcatctggacggcgatgaggcctatttgaaaaagtgcctgaacttttatgaaaaaatcggtgtgccggtatacggaattcattgccatgagaaaaaaatgccggcatcaattgacgagctgcttgataaatacaggccggatattttagtcatcaccggccatgatgcatattccaagcataagggaggcgtgaacgatttaagcgcctacaggcattccaaacactttgtcgaaaccgttcaaaaagcgaggcgtaaagtccctcatttggatcagctggttatattcgcgggggcctgtcaatctcatttcgagtctttaatcagagcaggcgcgaatttcgcaagttctccgtcacgcgtcaatatccacgcgcttgacccggtatatattgtcgcgaaaatcagcttcaccccgtttatggagcggatcaatgtatgggatgtcctgagaaatacgctgacgagagagaaagggctgggaggaattgaaacgaagggtgtgctgcgtgtcggtatgccgtataaatcaaatggatgagtgataaaacccgcatatatttcgctatgcgggttaattattttacaaattgatacataaatttccggaacttgtgaaaaataacgcagaaatcaatagaattttgtcaaaataattttgttgacaatgacttattaacgttgatataatttaaattttatttgacaaaattgggctcttgttgtacaataaatgtagtgaggtggatgcaatggcgaagacgttgtccgatataaaaagatcgcttgatgggaatttaggtaaacggcttacgttaaaagcaaacggcggccgccgaaaaacgattgagcgttcgggcattttagctgagacgtacccttctgtttttgtgatacaactagatcaagacgagaattcgtttgaaagagtttcatacagttatgctgatattctgactgagactgttgaattgacattcaatgacgatgcggcaagctcagtagcattttaatgggcagtgaaccttttgtttactgctttttgttttgccttctaaagctcttctaattattccctcgaaagtttcagccgattaaacggaagctataagtgtcacatgttttatcgtggcgtgcacgaatggtgatcaattctataaaaggggttgtttcgtttgggcagacgtcgtggagttatgtcagatgagttcaaatatgagctggcgaaggaccttggtttttacgatacggtgaaaaacgagggctggggaggcattcgggcgcgtgacgccgggaatatggtaaaacgcgcgattgagattgccgaacagcagatggcggctcagaaccaaaataaccgataatgcagtggcccgggggacaatccgttccccggttttttctatcggctgtcaaaaccggcgtcaatttcggataagtacctccgggtctccaaatgtgatacaatgttcatacttatgtttagatggagaagtaggtgaaagctatgcgtattttagaaaaagcgccggccaaaatcaatctgtccctcgatgtgacgagtaaacgcccggatggttatcacgaagtggagatgatcatgacgacaattgatttggcagatcggattgaactgacagaactgcccgaaaacgttatcagagtggcgtcgcataatcgctttgttccggatgatcaaaggaatctggcttatcaggcagccaaactgcttaaagaacgatttcaagtcaaaaaaggcgtttccattatgattacaaaagtgatccctgtagcggcagggcttgccggcggaagcagcgatgcggcagccacgctcagagggctgaacaggctttgggatttaaagctttctgtcgaagagctcgcggagcttggagctgaaatcggttcagacgtgtccttctgtgtatacggaggcactgccctggcaaccggacgcggtgagaagatcaggcacatcagtgctccgcctcattgctgggtcgtgcttgccaaaccgacgatcggggtatcgactgccgaagtgtaccgccggctgaacttacagcaggttcggcatcctgatgtgcaggcgatgattgacgcgattgaagaaaaaagcttccaaaaggtatgcggacaattaggaaacgtattggagtcggttacgctcagcctccatcccgaggtggcgatgattaaaaatcaaatgaaacgcttcggcgctgatgcggtgttaatgagcggaagcggaccgactgtattcggtttggttcaatacgaatcgaaggtgcagcggatttataacgggttaagaggtttctgtgatcaagtgtacgcggtgcggatgatcggcgaacagaatgctcttgattaaatccgtatgttaagttatattatttttaaattattcggattttgggggtaagttcatgaagtttcgtcgcagcggcagattggtggacttaacaaattatttgttaacccatccgcatgaattaataccgttaacgtttttctcagaacggtatcaatcagcaaagtcatcaatcagtgaagatttaacgattattaaacagacctttgaacagcaaggcattgggacgctgcttacagtgccgggagctgccggaggcgtcaaatacattccgaaagtgaaacaggctgaagcagaagcgtttatacaggagctgggacagtctttagtaaatcctgagcgtatccttccgggcggttatgtatatttaacggatatcttaggaaaaccatctgtcctctctcatgtaggcaggctttttgcttccgtttttgcggagcgggagattgatgtggtgatgaccgttgcgacaaaaggaatccctcttgcttacgcagcggccagttatctgaacgttccggttgtcatcgtgcgaaaagacaataaagtgacggaaggctccacggtgagcatcaattatgtatcagggtcgtctaaccgcattcaaacgatgtcgcttgcgaaaagaagtttggctacgggttcgaacgttttgattattgacgattttatgaaagccggcggcaccattaacggcatgatcagcctgcttgatgagtttaatgcaaacgttgcgggaataggcgtcttggttgaagccgagggagtgaatgaacggcttgtcgatgaatacatgtcactgctcacgctttcaaccatcaatatgaaagacaaaacgattgagattcaaaacggcaattttctgcgattttttaaagaacagcatttaaagaatggggagacagaaaaatgacaaaagcaatccatacaaaacacgcgccggcagcgatcgggccatattcacagggaatcatcgtaaacaacatgttttacagctcaggccagattcctcttactgctgaaggagaaatggtaaacggtgatatcacagagcaaacgcatcaggtgttcagcaatttaaaagctgtgctgaaagaagcgggcgcttctctcgagacggttgtcaaagcaacggtgtttattgctgatatggagcagtttgcggaagtgaatgaagtgtacggacaatactttgatgtacataagccggcaaggtcttgtgtggaagtggcgagactgccgaaagacgctctcgtggaaattgaagtcattgcgctggtgaaatcttaaatctcagaaaagtggttccggtctccgggatcactttttttatgcagtatatgatccccaaatatggtttatcacctaattgtgtatgtatatcctatattttcaaaaaaactttttgaaacgtgcaggaatttaaaaagaatcgtggaattgttagactaatgcttttatatagggaaaaggtggtgaactactgtggaagttactgacgtaagattacgccgcgtgaataccgatggtcgcatgagagcgattgcatccatcacgctggatcacgaatttgtcgtacatgatattcgtgtgattgatggaaacaatggtcttttcgttgcgatgccgagtaaacgcacccctgatggagaattccgcgatattgctcatcctattaattccagcacgcggggcaagatccaggatgctgttttaaatgagtatcatcgtttgggtgattctgaagcattagaatatgaagaagccggggcttcttaaacataacaaaatgtaaggactgctgataaaggctgacacaaggccttttccggcagtccttttttaaatctgatttttcagtaataaagcgattacatagaaaattcttgcactttttgatgtcttcttgaaatcaacagctatttaggatatatttttctatggataaaagggatattggaggccattaaatggataagcggtttgcagtgattttagctgccggaaaaggaacgagaatgaaatcgaagctttacaaggtccttcatccggtatgcggaaagcctatggtagagcacgtcgcagacgaagctctgaaattatctttagcgaagcttgtcaccatcgtaggacacggcgccgaagatgtgaagaagcagctcggacagaaaagcgattacgctctccaagcagaacagctcggtacggctcatgcggtcaaacaggcaaaaccatttcttcacggagaaaagggtgtcacgatcgttatttgcggcgatacaccgcttctgacggcggagacgatggaagccatgctgaatgaacatacagacaaaggtgcaaaagccacggtgttaacggccgttgccgacgatcccgccggatacggaagaatcatccgcagtgaagacggcgccgttcaaaaaatcgtggagcacaaggatgcttcggagcaagaacgtcttgtgaaagaaatcaacacgggaacgtactgttttgataacgaggctctttttcgtgtcatcgaacaggtttcgaatgaaaatgcccaaggcgagtattatctgccggatgtgatcgaaatcctcaaagacgaaggcgaaactgttgccgcttaccagactggtaacttccaagagacgctcggagtgaatgatagagtcgctctttctcaggctgaaatgtatatgaaagagcgtattaacaaacggcatatgcagaacggagtcactttaatcgatccgatgaatacgtacatctcacctgacgcacgtatcggacaagatacagttatttatcccggaactgtgttaaagggacaagctgaaatcggcgatgaatgtgtcatcggcccccacactgagatagaggacagctcaatcggcagccgtactgtgattaaacaatccgttgtcaatcgcagcaaagttgggaatgatgtaaatatcggtccttttgctcacatcagacccgattccgcaatcggcaatgaagtgaagatcggaaactttgttgaaatcaagaaaacacaattcggcgaccgaagcaaagcatctcatttaagctatatcggtgatgccgaagtgggcacggatgtgaatctgggttgcggctccatcacggtcaattatgatgggaagaaaaagtatttaaccaaaattgaagacggcgcctttattggctgcaactccaatctggtcgctcctgttacagtgggagaaggcgcgtacgtcgctgcgggttcaaccgtaactgaagatgtgccgggcgaagcgcttgccattgccagagcaagacaagtaaataaagaagattatgtgaaaaacattcataaaaaataatcctaaaatcggaggtttaccatgtctaacgaatacggagataagaatttaaagattttttctttgaattcaaatccagaacttgcaaaagaaatcgcggataatgtaggggttcaattaggaaagtgctctgttacaagattcagtgacggagaggtccagatcaacatagaagaaagtattcgcggctgtgattgctatatcattcagtctacaagtgcgccggtcaacgagcacatcatggaattgctgattatggttgacgctttaaagcgcgcttccgcgaaaacaatcaacattgtcattccgtactacggttatgcgcgccaggacagaaaagcaagatcgcgtgaaccgattacggcaaaactttttgcaaacctgcttgaaacagcgggtgcgacacgcgtgatcgcgcttgatttacacgcgccgcaaattcaaggtttctttgatattccgattgaccacttaatgggtgttccgattttaggccattactttgaaggtaaagacttgaaagatatcgttattgtttctcctgaccacggcggtgtgacgcgcgcccgcaaacttgcggaccgtctgaaagcgccgatcgcgattatcgacaaacgccgtcctagaccgaatgaggtagaagtgatgaacatcgtcggtaacgtggaaggtaaaacagcgattctgatcgatgatattattgatacggccggcacaatcacacttgccgctaacgcgctggttgaaaacggagctgcagaagtgtatgcatgctgtacgcaccctgtactgtcaggtcctgccgttgagcggatcaataactctaaaatcaaggagcttgtcgtaacgaacagcattaagcttcctgatgagaaaaaaatcgaacgctttaagcagctttctgtcggaccgcttctggctgaagcgattatccgcgttcacgagaaacaatctgtcagctatttattcagctaaaccgaaattttaaggtttaaatcccagttattgtgggtattgttctaataggacgataaaacgataattaggatggtgctgaatatggcaactttaaaagcaaatgaaagaacagattttaaacgttcgacgcttcggaaaatccgtcattcaggacatgttccagggattatatacggtaaagaaataacgaatacgcctgtctctttagacagtgtcgaattgcttaaaacattgcgggacgaaggaaaaaacacgattatcacaattgatgtcaacggaaatcagcaatcggttatggtgactgatcttcagacagacccgctcaaaaacgaattgacgcacgccgattttcaagtcgtgaatatgagtgaggagctggaggccgaggtgccgattcagctgacgggagaggcgaagggagtcaaagacggaggcgtcatccagcagccgctgcatgagctttcgattaaggctaagccgaaggacatccctcagacaatcaatgttgatatttccgggcttgaaatgaatgatgtgctgaccatcgcagatctgactgctgacggcaattatacatttacaaacgacccggaagaagtcgtggcttccatccttcctcctaagcaggaagcattcgaagaagatgcagaaccgtctcctggggaagagcccgaaggagaaaatcaataagcgctttaagacgtaacccgcccgaggttacgtcttttgtgctagaatgagaagaattacagcgatgttgagggaggatttacgatgcttgtgattgccggtctgggtaacccgggaaaaacctacgagaacacgagacataatgtcggctttatggccattgacgagctttctaaagaatggaatattgaattgaataaaacgaaattcaacggactttacggaatggggtttgtttccggaaaaaaagttctacttgttaaaccgcttacatatatgaatttatcaggggaatgtttgcggccgctactggattattatgatgccgatcatgaagatctgaaagtcatatacgatgaccttgatcttccgacggggaaaatcaggctccggacgaaggggagcgcaggcggacataacggaattaaatcgcttatacagcacctcggaacccctgaatttgaccgggtcagaatcggaatcggccgccccgtcaacggaatgaaagtcgttgactatgtactgggagcttttacgaaggaagaagcgccgcatatcaatgatgccgtctcaaaaaccgtaaaagcctgcgaagcttccttaacgaaaccatttttagaagtcatgaacgaatttaatgcaaatgtataagataaataatgggagaccatactagggaaaaatgattttttcacatcaggaggtccaacgtatggctttgcattatttctgccgccactgcggccttaaggtagggagcctggaatattcgacggtgccgacacagtcacttggatttcagcacttaacaaatgaggaaagaaacgatatgatttcatataaagacaatggagatgtccatgttcttacaatttgtgaagactgccaagaggcgctggagcgcaatccgcactaccatgaacacaacacatttattcaataagaagctttggtgtagattctagaccaaagcgtttttctgttcttgcagaaaatagagaggagggcccatatggacaacattcaaacctttattaaagaaagcgatgattttaaatccattgtcaacggtttacatgaggggctgaaggaacagctgcttgcgggtctgtcaggttccgcgcgttctgtttttacctccgcccttgcacaggaaacgaaaaggccgattttctttatcacccataatttatatcaggcccaaaaagtgacggaagatctgacggcgcttctcggggatcaatctgtttttttataccccgtgaatgaattgatttcttcagaaattgcggtagcgagccctgaactgcgcgctcagcggcttgatgtcattaatagattaacaaacggagaagcgccggtcgttgtggcgcccgttgcggcagtgagaagaatgcttccgccgaaggagctgtggaaaagcagccagctcgtcatttcactcggagacgaaatagaaccggatcagctgtccgcgcgccttgtagaggtggggtatgagcgttccgatatggtttctgcacccggtgaattcagtattcgcggcggaattatcgacatttatccgctgacgtcggagcatccggtgcgaattgaactgtttgatacggaggtcgattccatcagaagcttcaattctgatgaccagagatcaattgagacgctcaaacatgtggcgatcggaccggcgaaggaattgatcatcagggcggaagaaaaagcccgggcgatggaaaggctcgataaagggcttgccgacagtctgaaaaagctgaagcaggacaaacaaaaggaaatgcttcatatcaatatctcacatgataaagaacggttatcaacgggacagactgatcaggaacttgtgaagtatctctcgtacttttacgaaaaacctgctagtttgctagattatacaccggcagacacgttgttactgttagacgaggtcagccgcattcatgaaatggaggatcagctgcaaaaagaagaggccgaatttatgacaagtctgctcgaggaagggaaaattctgcatgatattcatttatccttcagctttcaggagcttatgagcgaaaagcggcgcccggctatttattattcattatttttgcgtcatgtccagcatacaagccctcagaatatcgtgaatgtgacaagccggcagatgcagagttttcacgggcagatgaatgtgctcgcaggtgaaatggagcgctttaagaaatcaaacttcaccgttgtctttttaggcgcaaataaggacagaaccgacagattggcatccgtgctggctgattacgaaattgaagccgcaaaaacggacagctccaaagcgcttgtgcaaggacaggtctatgtcatggaaggcgagctgcaatccggttttgaactgccgctgatgaagctggccgtcattacggaggaagagctgttcaaaaaccgaatcaagaaaaagccgagaaagcagaagctgacaaatgccgaacggatcaaaagctattccgagcttcaggtcggtgactatgtcgtccacgtcaaccacgggatcggtaagtatttggggatcgaaacactagaaatcaaaggcattcataaagattacctcaacattcattatcagggcagcgataagctgtacgtccctgtagaacaaatcgaccaggtgcagaagtacgtcggctctgaaggaaaagaaccgaagctttataaactgggcggcagtgaatggaaacgggtgaagaaaaaagttgaaaactccgttcaggatattgccgatgatctgattaagctttatgcggaacgggaagcaagcaagggctatgcgttctcgcccgatcatgaaatgcagcgacagttcgaatctgctttcccttatcaggaaacagaggaccagctccgttccattcaggagattaaaaaggacatggaaagagagcgcccgatggaccgtttgctttgcggtgatgtgggttacgggaagacggaggtagccatccgagcggcctttaaagcgatcgcagacggaaagcaggtcgcgcttcttgtgccgacgacaatactcgcgcagcagcattatgaaaccattatggagcgtttccaggactatccgattaacatcggtcttctcagccgattcagaacgagaaaagaatccaatgaaacgattaaaggcctgaagaacggaacggtagacatcgtaatcggaacccacaggctcttatctaaagacgtcgtctataaagatctcggcttgctcatcattgatgaagagcagcgcttcggcgtaacgcataaggaaaaaatcaaacagatcaaagccaatgtcgatgtgctgactcttacagcgacgccgataccgcgtacgcttcatatgtccatgctcggtgtgcgggacttatctgttattgaaacgccgccggaaaaccgtttccctgttcagacatatgtcgtggaatacaacggcgcgcttgtgcgggaagccatcgaaagagaactggcgcgcggaggacaggtatatttcttgtacaaccgcgtggatgacatcgagcggaaggctgatgaaatttccatgcttgttcccgatgcgaaagtggcatatgcccacggaaaaatgactgaaaatgaattggaaagcgtcatgctcaattttctggaaggggaatcagacgtccttgtcagcacgaccattattgagacaggcgtagatataccaaatgtcaacaccttgattgtgttcgacggagacaaaatggggctgtctcagctgtatcagctgagaggacgggtcggccgttccaaccgcgtcgcttatgcgtattttacgtaccgcagagacaaagtgctcactgaggtggcggaaaaacggctgcaggcgattaaagaatttaccgagctgggatcaggctttaaaatcgccatgcgtgacttgacgatcaggggagcggggaaccttctcggcgcccagcagcacggctttatcgactcagtcggttttgacctgtactcgcaaatgctcaaggaagcgattgaagagcggaaaggcgatattccgaaaagcgaacagtttgagacagaaatcgatatcgagcttgacgcgtatattcctgaaaactatatacaagacggcaagcaaaaaatcgacatgtacaaacggttcaggtcaatcgccacaattgaggagaaaaatgagcttcaagatgaaatcatcgacaggttcggcagctaccctaaagaagttgaatggctgtttacggttgctgagatgaaggtatacggaaaatatgaacgcgtcgaactcatcaagcaggataaagacgcgatcagatttaccatttctgaagaggccagcgcacagattgacggtcagaaattgttcgaactcggcaataaatacggccggcagatcggactgggaatggaagggaaaaagctgaaaatctcagtacagacgaaaggccgcaaaacggaagagtggctggagaccgtgctcggcatgctgaaaggccttcaggatgtgaagaaagaaacaatcgcgtcttcataaaaattgttactctctggtgtatattacatttgatgtgacggatactaatttcaagcgagtggcggaagctacataaagtaaagagctttagtactttcccttaaatatcatcacatgaaagagaggcaccagagagatgaaagctacaggtatcgtacgtcgtattgatgatctaggacgggtcgtcattcctaaagaaattcggagaacactgcgaatcagggaaggagacccgcttgaaatattcgttgaccgcgacggagaagttatattgaaaaagtattctcctatcagtgagcttggcgattttgcgaaggaatatgcagatgctttgtatgacagtctcggccattccgtcttgatttgcgaccgtgacgcgtatattgccgtttcaggcagttcgaaaaaagaatttctgaacaaagccatcagcgatttgctcgaaaaaacgatggatcagcgcagctcagtggtagaaaacgacgtgaagtccgcgcagcttgttaatgacattgatgaagatatgagctcctatacaatagctccgatcgtggcaaatggcgatcctatcggtgccgtggtcatcttttccaaggaacaggcacttggagaagtagaacataaagcggtagaaacggcagccagttttttggcgagacaaatggagcagtaggtcttattaccattattgaaataagaaaacggagaaagagcagctcttatacaagtgctgttctttttcatattcatatgtgctctctatcggttcggccgttaggattgtgatataataagctcgttttatagacgtaattttctagcggctggaaggagcttttggatgaacgattcagttggcgccaagcggcaatcggcatggaaaggtgcttttgtgctcgtcgttgcgggtatcgtgacgaagatattaagcgccgtgtacagggttccttttcagaatattgtcggtgacgtcggattttacatttatcagcaggtgtatccgtttttagggatcgcggtcatgctgtcaacatccggttttccggtaatcatctcaaaattaatgaacgattatagcgatcataaacaaaaaataatgaaaatttccgccctttatgtcacggcggccggacttgttctgtttgcgctcatgtatgccggcgcggcgccgttggccggttttatgggtgacgcccgccttgtgatgctgataagggtcgcggcgttcgctttcatactgtttccgtttacggcggttttccgggggtatttccaaggcgtgcatgatatgatgccgtcagccttatcccagattacggaacagcttcttcgcgtggcggtgcttctcggtttatccttctggcttttgaaaagcggccgttcattatacgcggctggtgcgggggcggcttcgggatcaattgccggaagcttggcggccctttgtgtattggctgttttctggtataagcgggaagaaacaaagaaagacggcggacatatcgaaacggccgtcattgtaaaaaagctgctgctttattcagtcaccatctgtatcagcagtgtactcatgcttttgattcagcttgtagacgccttaaacttatattcactgctttcagacgggacggagagccatgctgcgaaacagctgaaaggcatatatgaccgcggacagccgctccttcagctgggaaccgtgtttgccgtcagtatcgccgcgtcattggttccttcaatttcaaaagcggtgcatgagaataagccgtttatcataaaagagaaagcgacatcagccgtcaagctctgccttgcggtagggatcggtgcatcagccgggcttttttgcattttagagccggtgaatatcatgcttttccaaaacagtgaggggacgcagaccttacaaatattcagcttatctatcttttttgcctcgattgcgcttacagcagccgcgattctgcaaggagcgggacataccgttttccccgccgtatccgttttggcgggaggggcgctgaaatgggtgctgaatgtttggctggtccccggctggggtattacaggagcggcactggcgaccgtcttggcatttgccgcagttgcgtgtctgaatctccggagaatttggtcgaagggctggctgacgaatatcggcggcgtgattgcccatctgtgctggtgcagtctgctgatggtcttcttcctgctcgtatatatgaagctatggcagttatttgttcccgtcagcagggccggagctgtatgtgagagtctgtctgcgtcagtcatcggagggctattgtttatttattgtatgataagaatgaagattttcacggacgaagagctgagcggccttcctttcggcagtgctttaagcaaattgaaaaagaggagagaaaaacatggcaggtaacattacggtcgtcggcctcggcgccggagacatggatcagttgacagtgggcatacataagctgctgactcaggcgaagcatttatatataagaacgaaagaccaccctttgattccggaattagagcaagagacggaagcggacatccggtattttgatgatatttatgaaaaacatgatcagtttgaagcggtctatgaagagatcgcggacattctgtttgaaaaagcgaagcaagaggatgtcgtctacgctgtgcccgggcatccgtttgtcgctgagaaaaccgttcagctgttatttgaactccgggaagaacaacaggtagctgttcatactgccggagggcaaagctttttggatgccacttttaatgcattgcgaattgatccgattgaagggtttcaatttacggatgcgcaaacaatgacgccggatgagctcgaactccgccatcatctgatcatttgccaggtttatgaccagatgacggcctctgaggtaaaactgacactcatggagaaattgcctgacgactatgaagtggtcatcgtcacggcagccggaagcaagggagaaaagatgaccaaggtgcctttgtttgagcttgaccgcaatgtagaaataaataacttaacaagcgtgtatgttccgccgattaaaaaagaagaactcctttaccaggaattttctgcattccgaagtattattcgcgagcttcgcgggccgaacggctgtccgtgggatcaaaagcagacacaccagtcattaaagaaatatatgattgaggaatgctacgaactgcttgaggccattgacgaagaggacacggatcacatgatagaagaactcggggacgtcatgcttcaggttatgctgcacgcccagatcggagaagacgaggggtatttctcaattgatgatgtcatcagagacatcagtgcgaagatggtcagacggcacccgcacgtgtttaaggatgttaaggttcaggatgaacatgatgtcgtcgccaactgggaagaaatcaaaaaggcggaaaagcaaacaacatccacttcattgctggatgccgtgccgaaaacactgccttctcttgcaaaagcagccaagcttcagaaaaaagccgcaaaaaccggctttgactgggatgacgttcaggatatatgggataaagtaaatgaagagctgaaggaattttctgcagaggcttccgccgaatcagcagatgaaatcagcttaaaagctgaattcggcgatgttttatttgcattggtcaatatcggccgatactataaaattgagcctgaggaagcgctcgccatgacaaatgacaaatttcgcagacgctttgcttatattgagaaagaagcggcagcaaagggccttgaattgaccgcaatgtcacttgaggaaatggacaaattgtgggatgaagcaaaagaaatggagaggagattctgatatgagacttgataagtttttaaaagtatccagattaattaaacgccgcacattggcgaaagaggtcgccgatcaagggagaatcacagttaacgggaatcaggcgaaagccagctcagacgtaaaagccggtgatgaactgacggtccgcttcggccagaagcttgtcaccgtgaaggtaaacgaattgaaagaaacaacgaaaaaagaagaagccgcgggcatgtatacaatcgtcaaggaagaaaaactcggcgaataggcttgttctaaacaaggctcccgcctcatacaatgcagtaataatgctaaaagtatcgaggatatgggggctgaatagatgaattcatattatgagcaaaaaggttcttcttctgttccggaacagcatgatgtaacgatgaaagggagaaagcatttagacatttcgggcgtcaagcatgtagaaagttttgacaacgaagagtttttgctggaaacggttatgggaatgctttccgtcagaggcgagaacctgcagatgaaaaaccttgatgtggaaaaagggattgtatctataaaaggcagggtgtttgaccttgtatatttagacgagcagcaaggggataaagctaaagggttttttagcaagttgtttaaatgacgctgaccacccaattttatacgatgctggcaatgaccggtatgggcgcctggctcggagcgtcgcttgatacatacaggctgtttgtcagccgcgccaaaacggccagatggctgttattcattcatgacattctcttttggattgtacaaggtctgctgtttttctatgtgctgctcaacgtgaatgaaggagaactcagggtatacattttcttggctgtcttactggggattgcgacgtaccaaagcctgtttaaacgaatgtatataaaaatactgaaatttgccattcatcttgcggtgtctctttaccaattcgcaaaaaagctcattcagcacgtgctgttccgtccggtgcttctgctctttaagctgctcatcgggctgatcacggttatttctttatactcctatcgggtgagtgccttttttgcgaagtgtctttttaagatcgtaacgtttttgctgtatccgctgatttttctgttgaaacaattattgaaacttcttcctgaaaagtggcgtcttactttcaaacgatattttcaaaaaagtgcaggatttttacaaaagagcaagaaactaatcataacaatcagatcgaccatgatacgtattttgaaaaggtgaaaggaggaccgtctggtttgaatctatctagagaacgtacaataactgaaatccaaaacgactataaagagcaggttgaacggcaatcccagcttatgaaaagaaggcggaaagggcttttcagacggttgatcgtattcggcgcccttgtgttgttgacggctattgtcttagcgggttctctgtggtcacagacctcttcccttagcgcaaacgaagaaaagaaagctcagctggaaaaacaagtgaaagaattgaacgcgaaacaggctgatttaaaagatgaaatttccaaattaaaggatgaggattacgtcacagagcttgccagaagagacttgtttatgtcaggaaatggtgagattctcttcaatgtagaaaagaagagcaagtagccttgttgacacttaaatttttatttaggtataattaaacaaacgatctttttataagcctaaggaggagcactttttttatgtcgattgaagttggcagcaagttgcaagggaaaataacaggtattacaaatttcggagcatttgttgaattgcctggaggctcaaccggtctcgttcatatcagtgaggtagccgataattatgttaaagacattaacgagcatttaaaagtcggcgatcaagttgaagtgaaagtcatcaacgttgaaaaagacgggaaaattggtttatcaattaaaaaagctaaagaccgtccgcaagccagacctagaaatgatttccgtccgaaagaatcttttgaacagaaaatgaacaagtttcttaaagatagcgaagaccgcttatcatctttaaaacgaaacacggaatcaaaacgtggagggcgcggagcaagaagaggataacttgctgctttctataaatacatggagcatccgtctatcccagcgggtgctttttttgtatgcgccattatagtcagaaaattaaaacttcaaagtttctgttgacggaatgaagaaacctttgtattatataacttgtgcttataagcacctatatggcggtgtagctcagctggctagagcgtacggttcatacccgtgaggtcgggggttcgatcccctccgccgctaccatatatatctggcccgttggtcaagcggttaagacaccgccctttcacggcggtaacacgggttcgaatcccgtacgggtcatcaagcgaatcggcttctgttgcagaagccgattttttcatatttagacaactttttgagaaatgtcggaggaaatacgaaaggaaaggggaacaagggagaaagcgtcgaagagttctttggaattgttaccttcttttgacaaaatcctatctgggctttcatttataatgacaagcaacgaataaaacaggtgggggatgagagcaatggaaaaagcggaaagaagagtgaacgggccgatggcgggacaagctctggaaaaactgcaatcgttttttgaaaaggcggcaaagcttacagtccatcaagcgcattcactttttttctataagggtttcatttatgtcgtgatcggttttttacttggacgggctttcatattatctgaggttcttccgtttgcgctgccgtttttcggagcgatgcttttgatcagaagagataaagccttctatgcttgtctgtctttacttgcgggcgctttaaccatttcgccgaaacactctttattgattctcacagctttggccgtcttcactctattttcaaaaatcggtacatatatcgtgcaggaccgggtgaagatgctgccgatcgtggtgtttttctctatggctgccgcgagaatcggatttgtttattttgagagcggcgcttttaccacctatgattatgtgatggctgttgtcgaggcgggcctggcctttattttgacgctgatctttttgcaaagcctgccgatcttcacgatcaaaaaagtgaagcaatcgttaaaaatagaagaaatcatctgttttatgatcttgatcgcatccgttttaaccgggcttgccggtgtttcatttcagggaatgcaggctgaacatatcctggcccgctatgtcgtgctgagtttttcctttgtcggcggggcaagcatcggctgtacggtcggtgtggtgaccggactgatcctcgggcttgcgaatatcgggaacctctatcaaatgagtctgcttgcgttttccgggcttcttggcgggctgctgaaagaaggaaagaaagccggagccgcagtcgggttagtgatcggctcactgctgatttcattatatggagaagggtctgccggattaatgaccactctttatgaatctttgattgccgttgttttgtttttgattacgccccaatcgattacgaaaaaggtggcgcgatacataccgggcactgctgagcacagtcaggaacagcagcagtacgcgaggaaaatcagagatgtcaccgcccagaaagtagaccagttctccaatgtgtttcatgccttgtcggagagcttcgccacctttcatcagacgtcttccgatgagcaggcggaagaaggggaagtggatctctttttaagcaaaatcaccgagcattcctgccaatcctgctataagaaaagcaaatgctgggttcaaaactttgataaaacatatgacttaatgaaacaagttatgcatgaaacagaagaaaaacagtatgcctcaaaccgcagattaaaaaaggagtttcaacagcactgttccaaatccagacaggtggaagagctgattgaggacgaacttgcccaccatcacgcccatctgacactgaagagaaaagttcaggacagcagaaggcttgttgccgagcagctgttgggggtttctgaggtcatggcggacttttctcgggaaataaaacgggagagggagcagcattttattcaggaagaacaaatgatagaggcgcttcagcattttggaatcgagattcagcatgtcgagatatacagcttggagcagggcaatattgatatcgaaatgacaatcccgttcagcggaggacacggcgagagtgagaaaattatcgccccgatgctgtctgacattcttgaggagcagatacttgtcaaaagcgaacagcactcgactcatccgaatggctacagccatgtcgcattcggttcgaccaagtcgtaccgggtatcgacaggcgcggctcatgcggcaaaaggcggcggccttgtctccggcgacagctacagcatgatggaactgggggcgagaaagtatgcggccgcgatcagtgacggcatgggcaatggggcgagggcccattatgagagcaatgaaacgattaagctgctcgaaaaaattctcgaatcaggtattgatgaaaaaatagcgataaaaacgatcaacagtattctgtctttacggacgacagacgaaatctactcaactctcgatctttctatcattgatcttcaggatgcaagctgcaaattcttgaaggtcggttcaacgccgagttttatcaagcggggagatcaagtcatgaaagtgcaggccagcaatctgccgatcggcatcatcaatgaatttgatgtggaggttgtaagtgaacagttaaaagcgggagatctgctcgtcatgatgagtgacggtatttttgaagggccgaagcacgttgaaaaccacgacctgtggatgaaacggaaaatgaaagggctgaaaaccgaagacccgcaagaaatcgctgatatattaatggaagaggtcatcagaacgcgttccggccaaatcgaagacgatatgacagtggttgttgtccggattgaccacaacacgccgaaatgggcttccataccggtgccggcggttttccaaaataaaaaggagatttcttaatccattcgtataaatcactttccttctggcgaagatgggactaatcgtatcaccgggaggaatgtatgtgaataagggacatttaaatcaagttctgctgattacagatggctgctccaatcatggtgaagacccgattgcaatggcggctttcgccaaggagcaggggattacggtgaatgttataggaattatggaagaaaacgcgattgaccaagaagcaatgaaggaagttgaaggcatcgccatggccggaggcggcgtccatcaagttgtgtatgcgtcacaattgtctcagacggttcaaatggtgacgaaaaaagcaatgacccagacgctgcaaggtgtcgtcaatcaagagcttaaacaaattttagggaaaaacgttgaaatggaagagctttctcctgaaaaacgcggcgaagtgatggaagtggttgatgaactcggcgaaacggttcatctgcaagtgcttgtgctggttgatacgagtgcgagtatggcgccgaaactgccgacggtgaaagaagcgctgatcgatctttccatcagtttaaattcccgggccgggcaaaatgaatttgcaatgtgtatatttcccgggaaaagccaggaagttgagcttgtgctgaattggacgccgaagcttgaatccctttctgcactctttgcgaagctgtcgaccggcggtatcacccctacgggccccgctatccgggaagcgacgcagcagtttgagagaatccgctcaagaaggagcatgttggcagatgatgaacgacgctttaacgagtttggcatgtagtctggcaccggggacggcaattcagggcaaatggaacggcaaatcctacagattgctcaaacagcttggaaaaggggctaacggtattgtatatctggcagaagcatcaggcggacaggtcgctttgaaaataagcagcgacagcatgtctgttacctctgaagtgaatgtcttaaaatccttttcaaaggcccggtcgcaaacgatggggccttctttttttgatgcggacgacgcgtttattccgcagctgaataaaaatgtctctttttacgtgatggagtacatagaagggccgcttcttccgcaatatatcagcagtaagggaacagagtggattccggtgctgatggtgcagcttctttccagcctgtcagtccttcatcagcaagggtgggtttttggcgacctcaaaccggacaatctcattgtaaccggaccaccggctgccattcgctgcattgatgtagggggaacgacaaaacagggccgcgcgattaaagagtatacggagttttacgacaggggctattgggggtatggaacaagaaaagcagaaccatcctatgacctgtttgctgtcgcaatgatcatgatccactgtgcccagaagaaagagtgcaaaaagtcaggacagccgaaagaacagcttcgttctatcattgaaggccacccgtttctgaataagtataagaaggttctgttttctgcttttaacggccaatatccgtctgcggaagccatgaagcatgacatcctgacggcggggcagagtgcagggagtaaaaggaaagccgccgccaagcctaagccgccgcaatcaaaaccgcggcagggcactgtatctcaaacgcggtataaacctaaacaaaaacccgcaaagcacaatggtttgtttgaaacaacacttattttaatcagcgttctcgccctttatttcgcttacatcgtcttttttctcatctagtgccggccggacgcctgcgctcatgcttcttctttgcttggagggaatgaaagtgataggatatgtatatctttaaaaaacctgctcattgtgagggggacattgtgaaaagcgtggaagattttttcaaaacatatcatcttcaggcggagggagaaacgattattgccggggtctccggaggccctgattcaatggcgcttctcagtatgctgaataagcacttcgggcattcctccgttatcatagcggcgcatgtcgaccatcagttcaggggtcctgaatctgaagaagatatgaagtttgtgcagtcatattgcgaagcggaacacatcctctgcgaaacggtacagattgatgtttctgcatacgcaaagaagaataagctgaacaagcaggctgccgcgcgtgattgcagatatcagtttttcgaagatctgatgacaaaacaccaagcgaagtttttggcgctggctcatcacggcgatgaccaggttgagacaatgctcatgaggcttgcgaaaggtacgctcggggcagggcttgcgggaatgcagcccgtccgcgaatttgcatccggctggctgatcaggcctttcctctatgcggcaaaggatgaaatccttgaatactgccgtcaagaagggctcagctacagaacggatgagagcaatgcaaaagacgattatacaagaaacagattcagaaagaccgtgcttccttttttaaaacatgaatcacctgacgttcataaaatgtttcaaaaggtgagtgaagcactgacagaagacgaacaatacctgcagtcattaacgaaagaacgaatgaataaggttattacaagcaagtcagacacatcggttgaagtcaattcctctcaattgcttgcccttccgatacctttacaaagaagaggagttcaactaatattaaactatctttatgaaaacgttccatcgtcgttttccgcccgccacatacagcagtttctcgaatgggcggaaaatggaagcgcctcgggagtgcttgattttccgaaagggctgaaggtggtcaaatcatatcagacatgtttgtttacatttgaacaatggcaatgtgaaaaagttccctttgagctgcagctgcaaggagcgaaaggcgagactgctgttctccccaacggctttatgatagaggtggccgatcaggctgatcctcatatcaaaaatgggaatgctgtttttatgacaagcagaaacaaggtgcaatttcctttaacaatccggacgagaaaaatcggcgaccggatcaaacttaaagggatgaatggctcgaaaaaggtgaaagatatatttattgatcataaactgcctctgcgggatcgggacgaatggccgattgtaacggatgcgagcggtgaaattatctggctgcctggcttgaaaaaatccatctttgacgatcttgtgatttcaaacagtgaccgcattgtattacaatatagacagcatgaaaagtgtagggggcaagcattaacatgaaacaggatatcgaaaaagtgctgatctcagaagatgagatccagcagaaagtaaaacagcttggagaacaattaacaagcgagtacagcgacacgtttccgttggcaatcggtgtgttaaagggagcgcttccttttatggctgatcttataaagcatattgatacatatttggaaatggacttcatggatgtatcaagctacggaaattccacggtttcttccggagaagtcaaaatcatcaaagatttggatacatctgtagaaggccgggacatcttaatcattgaagatattatcgacagtgggttaaccttgagctatctcgtagaactcttccgatatcgtaaagcgaaatcaattaagattgttaccctgttggataaaccaagcggaagaaaagcggacattaaagcagacttcgtaggctttgaagttcctgacgcgtttgttgtgggttacggacttgattatgccgaacgctatcgcaatctgccttacatcggagtattaaaaccggcgatttatgaaagctgatcggctgcctgcttccgagatggttatcggttgtattggaatgattttctatggtactattgaacatagttgtgcttactgtgggaggaggtaaggaatgaatcgggtcttccgtaataccattttttatttacttattttattagtagtaatcggggttgtgagttacttccagacttcaaacccgaagacagaaaatatgtcgtacagtacgtttatcaagaacctcgatgaggggaaagttgatagcgtatcggttcagcctgtcagaggtgtttatgaggtaaaaggacagctgaaaaaatacgacaaagaccagtactttttaacacatgttcctgaaggaaagggagcagaccagatatttgatgcaattaaaaagacggacgtaaaagttgatcccgcacaggaaacaagcgggtgggtgacgttcttaacgacgatcattccgtttgtcatcatctttattctgtttttcttcctgctcaatcaggctcagggcggcggcagccgtgtcatgaacttcggaaagagcaaagcgaagctgtatacggaagaaaagaaacgcgtgaagtttaaagatgtagccggcgcggatgaggagaagcaggagcttgttgaggttgttgagtttctgaaagatcctcgcaaattcgccgagcttggcgccagaattcctaaaggcgtgctgctggtcggacctccgggaaccggtaagacattgcttgcgagagcctcagccggtgaagcgggcgttcctttcttcagcatcagcggatctgacttcgttgaaatgtttgtcggtgtcggtgcttcccgtgtgcgtgatttattcgaaaatgcgaaaaagaatgcgccttgtctgatcttcattgatgagatcgacgcggtaggacgtcagcgcggcgcaggtcttggcggcgggcatgatgaacgcgaacagacgctgaaccagctgcttgttgagatggacggtttcagtgcgaatgaaggaatcattattatcgctgcgacaaaccgtgcggacattctcgaccctgcattgcttcgtccgggacgttttgaccgtcagattacggtagaccgtccggatgtcatcggccgtgaagccgtattacaggtccatgcgagaaacaaaccgcttgatgaaacggtgaacttaaaagcaatcgcttcaagaacacccggtttctcaggcgccgatttagaaaaccttcttaacgaagcggcacttgttgctgcccgtcaaaacaagaagaaaattgatatgcgcgacattgatgaagcgacggaccgtgtcattgcgggtcctgcgaagaagagccgcgtcatatcgaaaaaagaacgcaatatcgtggcgtaccacgagggcggtcacaccgttatcggacttgtgctggatgaagccgatatggttcataaagtaacgatcgttccgagggggcaggcgggcggatacgcggtcatgcttccgagagaagaccgttacttccagacaaaacctgaacttctcgataaaattgtcggtcttctgggcggacgggttgccgaggaaattatcttcggcgaagtcagcacgggggctcacaatgacttccagcgggcaacgagcattgccagaagaatggtgacagagttcggtatgtcagaaaaactcggaccgcttcagttcggtcaatctcaaggcggtcaagtattcctgggccgggatttcaacaacgagcagaactacagtgatcagatcgcttacgaaatcgatcaggaaattcagcgcatcattaaagaatgttatgagcgtgcgaaaaccatcctgactgaaaatcgcgataagcttgaattgattgctcagacattgcttgatgtggaaacattagatgcggaacaaatcaagcatctcgtggatcacggaaaactccctgagcgcaatttctcagatgaccatcttcaaaaagacgatgtgaaagtaaacatcctgtctaaaacagaagacgaaaagaaagacgagccgaaagaatagttcgctttctgatatgaaaaccgccggcgtataccggcggtttttttactggttccgttttgtttacaaaagagccgcagatcgtgtatggtattgtagaatgttgaaaatgttatgattagaaactattcaaaagtggtgatagaggttgttactggttatagatgtggggaacaccaacaccgtgattggtgtatatcatgatggggaattagaatatcattggcgcatagaaacgagcaggcacaaaacagaagacgaattcggcatgctgctccgctccttatttgaacattccggactcatgtttgaacagattgaagggattatcatctcatccgtggtgccgccgattatgttctctttagaaagaatgtgcacaaaatactttcacatcgagccgcaagttgtcggcccgggaatgaaaacaggtttaaatataaagtatgacaatccgaaagaagtgggagctgacaggatcgtcaatgccgttgcggcgatccagcagtatggcggccccttaattgttgttgatttcggaacggcgacgacgtattgctacattgatgaaaacaaacaatacatgggcggcgcgattgctcccggcattacgatttcaacggaagcgctgtactcacgtgcggcgaagcttccaagaattgaaattgcccgtccggacaatatcatcggcaaaaacacggtaagcgccatgcagtccggcatcctttttggctatgtcggacaagttgaaggtatagtgaagcggatgaaatggcaggcaacacaggaaccgaaagtcattgcgacaggcgggcttgcgtcattaatcgcaaacgaatcagactgtattgatattgttgacccgtttctcactctgaaagggctggaaatcatttatgagcgaaatcgcgtgggtcacgtataggaggtaaacgatggattatttaattaaagcaattgcatatgacggtaaagtgcgggcttatgcagccagaacgacagatatggttaatgaagcgcaaagaaggcatgacacgtggccgacggcatcagccgcaatcggccggacgatgacagcttctctgatgctaggagcgatgcttaagggtgaagataagctgacagtcaaaatagaaggcggcggcccgatcggagccattgtcgcagatgcgaacgcaaagggtgaggtaagagcatacgtatcaaacccgcacgttcattttgatctcaatgaacaagggaaactggatgtcagacgggcggtcggaactgatggaacactcagtgtcgtaaaagatttgggcttgcgtgattattttacgggacaagtagagattgtctcgggtgaactcggtgacgacttcacatattatcttgtttcttctgaacaagtcccttcatctgtcggcgtaggtgttctggtaaatcctgataacacgattctcgctgcgggcgggttcatcattcagcttcttccggggactgatgaagaaaccatttcaacaattgaaaagcaattatctcaaatcgaaccgatttcaaaattgattcaaaaaggcctgacaccggaagaaatcttggaagaagttctgggtcaaaaaccggacgttctcgaaacaatgccggtcaaatttcactgttcttgttcaaaagatcgattcgaaacggccattttaggactaggcaaaaaagaaatacaagatatgatagaagaagacggaaaagccgaagcggtttgccatttttgtaatgagaaatatttatttacaaaagaagaactggaagagcttcgtgacgaaacaacccgctagctctttagcgggttgttctattttataaaagggatggggtagattttgaaatcgagaacacttttgacgattattgtagcggcgctgttagtatgcagtgtgacagtggcgtataagttaacaaaatcccaagccgcggggtcatctgaagaatccatcgcgacaatcggtgataaacatatcacacggcaagactggatgaaaaagatggaagaccagtacggaaaatcaactctggaagacatgattaatgcagaagtagtggaagagcttgcgaaaaagaataaactcacagtttcaaacagcgaattggagcgggagtttcttttaatcaaagcggtagataattcattttatgaagacagccatattaccgaaaaagaatggagagaccagatccgctacaacattcttcttgaagaactgctgacgaaggacatcgatatatcggataaggaaatgcaatcattttataataaaaataaagaattgtaccatttcgatgattcatacagaatccggcacattgtcgtcaaaaacaaagatgaggcggacagggtgcttgctgatttgaaaggcggttccagctttgaagccgtcgccgctgagcgttccacggacagatacacgtctcagtatggcggagacctcggctttgtgacagaaaaccaggaaaatatcccgcaggcatatatcacagaagctaaaaatcttaaagaagatgaatggtccgctgaaccgattaaagtttcttcaggatacgccgtcattcagctgaaagaaaagcttaaagcgagaactttctcatacaatgaagtgaagagccaaatcagacgccagatcgcgatggatcaattaggtgacaaggcgacagtcaaaacgctgtggaaagaggcgggggtctcttggttctacggggaaaaaagaactaaatgattgacaaaaaattttgaaattgataacttatatttataataccaataaatttagtcggaaattgaggtgtccaacatggtgcgtattgcaaattctattactgaactaatcggaaatactcctattgtgaaattgaatcgcctgacggatgaaaacagtgcagatgtatatctgaagcttgaatacatgaatccgggcagcagcgtaaaagatcggatcggagtggcgatgattgaagcggctgaaaaagaaggaaaattaaaagccggcgacacaatcattgaaccgacaagcggaaatacaggaatcggtcttgcgatggtggcagcggctaaaggtctcagagccattctcgttatgcctgatacaatgagtatggagcgacgcaatctgctgcgcgcatacggagcggagcttgtgctgactcccggcgcagaaggaatgaagggcgccattaaaaaggcggaagaacttgccgaggaacacggatactttgtgcctcagcaattcaacaatgcggcaaacccggaaattcaccgccaaacgacggggaaagaaatcgtagaacagtttggtgacgaccagcttgatgcgttcgtggccggaatcggtaccggcggaaccatcacgggagcgggcgaagtactgaaagaagcatatccatccatcaaaatctatgcggtagagccggcggattctccagttctttccggcggaaaaccgggcccgcataaaattcagggtatcggagcgggatttgtccctgaaacattgaatacggacatctatgatcagatcattcccgtcaaaaacgaggatgcatttgaatatgcccgtaaaacggcaaaagaagaagggattctcggcggcatttcttccggagcggccatttacgcggcactggaaatcgcgaaaaaactggggaaaggcaagaaagtgcttgcgatcatccctagtaacggagaacgttacttaagcacaccgctttatcagtttgaatagagacatacacacggctcccggctgtatccgggagtttttttgtgcctgaagcatcgaaaatccaaaaaacgtttcgaattttatggttggaagtgaaattcacttttttcaccagtgtgattgctttaaaataaaactacagtaaaacgaagcagaggattgatatgatggcacaacgcagaccggcaggaagaaaaataccttttacgaaacaagcatttttacagcgatatgaaaacctttcgaaatcgagaaaacggcatgttctgctcgaaagcgcgagagggggaagattcagtatagccggtctagatccgattgcgtccgtcagagggaaagacggaattacaacgatcaagcatgagggggaaacactgtttaaagaaggtgacccgctgcgggcctttcatgaatggtttggaacgctcggaacggaaacaaacgttgagtttccggactttcaaggcggtgcgattggttttatcagttacgactacgcccgatatattgagaattttaagatgctgtcgttagatgatctggaaacacctgatatttactttcttgtttttgatgatgtggccgtttatgaccatgaggaagaggcgttatggctcattacccatactgaagcggaagaagcggatcttgcggaagaaaagctgtccggcttagaggacatgtggtgttccctccaaacggcggacgagcctttttcaccgctgaatcggaatggggacggatcgtacgccgctccgttcactgaagaaggattttcgcaggctgtagaacaaattaaacaatatatcgcgagcggcgatgtgttccaggttaatttgtccatcaggcagtctcagtccttatccgttcatccgtatgaggtgtataaacacttgagaaacgtcaatccgtctccttatatggcctatctcgagacaccggggtttcaagtgatatgcgggtcgccggagctattggtgacaaagaaggggaagaagcttgaaacgagaccgatcgcgggtacgcgttcaagaggaaaagacgatgctgaagacaaggctttggctgatgaattaattcacaacgaaaaagaacgtgcggaacacgtcatgcttgttgatcttgagcgcaatgacctcgggcgcgtatcgcgctacggctccgtgcgggttaacgaatttatggcgatcgaaaagtattcccacgtcatgcatatcgtgtcaaacgtacagggggaactgcaggacggatatgacgcgacagacattattcatgcggttttcccggggggcaccatcacgggagcgcccaaagtgagaacgatggaaattatagaagagcttgagccgacaagacgggggctttatactggatctataggctggttcggattcaacggagatttgcagtttaacattgtgatccggacgatctatgcagccggcggacatgctttcatgcagtccggagcaggagtagtcattgattcggttccgaagcatgaatacaaggaatcgttcaaaaaagcttttgcaatgaaaaaggcgttagagctgagcgaagaagagacaaaaaattagacgaggtgagcagagatgattttaatgattgacaattatgattcatttacgtacaacttggttcaatatttgggtgagctcggggaggaactgatcgtcagacggaatgacgagattacaattgagcagattgaagagctggcaccggatttcttaatgatttcacccgggccgtgcagtcctgatgaagcggggatcagcctcgaagcgatcaaacattttgccggcagtattcctattttcggcgtatgtctcgggcatcagtcgattgcgcaagtattcggcggcgatgtcgtcagagcggagcggctcatgcacggcaaaacgtcagaagttatgcatgacggacagacgatttttaaaggcctgcaaaatccgcttgtcgccacccggtaccattcacttattgtcaaagcggacacgctgccggagtgttttacggtatccgctcaaaccaaagaaggagaaattatggcaatccgccataatgagctgcctgttgaaggtgttcagttccatccggaatccatcatgacctccttcggcaaagagatgctcagaaactttatagagacacaccgcaaaaaggaagtgacggtgtgattatatatttgaatggtcaatatatagaggagaaagaagcggcgctttctccttttgaccatggttatctgtacgggatcggcgcgttcgagacgttcaggctttacagcggccggccgtttttgccggatgcgcatgtcgccaggctcaacagggcgcttcgggatgtgcagattgcatatgaggtgaacaaacaggagctgcttgatatgcttcggagactgttgctcctcaatgacatcaaggacggcagcgcgcgtgtccggcttaacatctcggcaggagtcagcgataaagggtttgccgcgcagacttatgaaaagccgaccgtcctttgtttcgtcaaccggctcaatccggaaactctgcctgttcaaaaagaaggcaagcttctctctatcaggagaaatacgcctgaaggatatttccggttaaaatcccatcactatttaaacaacatgtatgctaaacgggagatcgggaatgatcccaatcttgaaggcattttcctgaccggagaaggagatgtcgcggaaggcattgtctccaacgtgttttggcgaaaaggagacaaggtctttacgccatccttggatacgggaattctcgatggtgtaacgagacagtttgtcattgatgaattgaaacggcaggggacagaagtcaccgaaggccgattccgttttcaatcaatgcttgaagcggatgaagcatggttgacaaactccgtgcttgaaatcatcccgttttctaaaatagaggaagtgccgctgcccggagtgagcggaaaaacggtgcaattgctccgtaatcagtatcagcaggaaataaacaaaatgaatgtacaggaggaggaacaaaatggcgcagcaaacaattgaacagcctaaactgattcatacaaaaaaaggcgctctttcctataaagagaagacgctcgttatggggatattaaatgtaacgccagactccttctctgacggcggcaaatacgacagtacggaaagggcgcttctgcatgcggcgaagatggctgaagaaggggcgcatatcatagatatcggcggcgaatcgacaagacccggcgcatcactcgtgtcggctgatgaggaaatgtcacgagtcatccccgtcatagagcggatcacaagcgagctggacattccgctttcaatcgatacgtacaaagcgtccgtggcagacgaagcggtcaaagcgggagcctctatccttaatgacatctggggggcgaaaggtgatcctgacatggcgtcagtagccgccgcacacggggttccgattatcttaatgcataatcgcatggaaagaaactacaacgatcttattcctgatatgcttgcagacttgatggaaagcgtaaaaattgccgcagaagccggcgtcacagatgaaaacatgattctggatccggggatcggctttgcgaaaaactatgaggacaacctggctgtcatgaacaagctggaggtgttcagcgggttaggttatccgctgctcctggcgacatcgagaaaaaggttcatcggccgtgtgcttgaccttccccctgaagaacgtgctgagggaacgggagcgacagtatgccttggcgtccagaaaggctgcgacattgtgagggtgcacgatgtcaaagagatcgcaagaatgactaagatgatggatgctatgttgaacaaaggaggcgcacattatggataaagtatatgtagaaggtatggagttttacggatatcacggcgtgttcgaagaagaaaacaaactcggccagcgcttcaaagtagacctgactgccgaactggatttgagcaaagcgggaaaaacggatgacctctcttataccattaactatgcggaattgtacagtgtctgccgcggcatcgttgagggcgagcccgttaatttggtcgagacccttgcggaacggatcgcagacaccgtccttgagaaatttgagccggtgcagcaatgtacggtaaaggttgttaagcctgacccgccgattcccggccattataaatcagtagccatagaaatgacgagaaagaaatcatgaacaatacggcatatatcggcctcggctccaatatgggcgaccgtgaacattatttgcgccaggcagtggccatgctcagccggcatcatggcgtgacggtgtcaaaggtgtcctccatatatgaaacagatcccgtcggctatgaggatcaagatcagtttctcaatatggcggttgaagtaaaaacgtcgttatctccttttgaacttcttgatgtaacgcagagcattgaagctgaattaggcagaacgagagagattcgctggggaccgcggacggcagaccttgacattttgctgtataatcgtgaaaatattgaaacagagcggctgattgttccgcatccgagaatgtatgagcgcttatttgtccttgcgccgttaaaagaaatatgtccgcaggcggatcatatcacgataagcgctgaaacaaaccaagaaggtgtaagagtatggaagcagaaatctggggtaggcgaattcgtgcattcagaaagctgaaaggttatactcaagaaggatttgcaaaagcattaggtatatcagtttctattgtcggtgaaattgaacgcggaaaccgattgccgtcagatgccatcattcaagctgcggcagatgttttaaatataagtgcggacgaattggccccgcctgaaaaatagacaaatgaaaggaggggaaaaatgtttaaaatcggtgatattcaattgaaaaaccgggttgtgcttgcccctatggccggtgtctgcaactcagcgttcagattgactgtaaaggaattcggagccggattggtatgcgctgaaatggtcagtgacaaagcgattctttacaataacgccagaacaatggggatgctttacattgatgaacgtgaaaaaccgctcagccttcagatttttggaggaaaaaaggaaacccttgtggaagcggcgaagtttgtagatcaaaacacgactgctgatattattgatattaacatgggatgtcccgtacccaagattacaaaatgtgatgcgggcgccaaatggcttctcgatcccgataagatttatgaaatggtatccgcagtagtagatgctgttgataagccggttacagtgaagatgagaatgggctgggatgaagagcacatttatgcggtgaaaaatgcccaagccgttgaacgtgccggcggaaaagccgttgccctgcacggacgcacaagagtgcaaatgtatgaaggcactgcgaactgggatatcattaaagaagtgaagcaatccgtctccattcccgtcatcggaaacggtgatgtcaaaacgcctcaggacgcgaaacgcatgcttgaggaaacaggagttgacggcgtcatgatcggccgggccgcactcggcaacccgtggatgatttaccgtacggtgcactaccttgaaaccggcgagttaaaagacgaaccgaaagtccgtgaaaaaatgtcggtatgcaaactgcacttagaccgcctgattaagttaaaaggcgaaaatgtggcagtcagagaaatgagaaaacacgctgcctggtacctgaaaggtgtcagaggcaatgcgaatgtacgtaacgaaattaaccaatgtgagacgcgtgaagaagttgtgcagcttttagatgcatttaccgccgaagcagaggcaaaagagcttcaagatgcaaaagtaggttaatatacaccctctattgctgctcactgccagcttaccgctggcagtttttctgctttttcgtgaaatcaaaatgtaacggagtgataccaatgagtcaagaagagcaaaatcatgaggaattgaacgaccagctgcaagtcagacgagataaaatgaaccagctgagagaaaacggcattgaccctttcggcgaacgtttcgagagaacgcatcaatctcaacagatcattgacgcctaccaggagctttctaaagaagaactggaagaaaaagcgatcgaagtgaccattgcaggccgtatgatgacaaagcgcggaaaagggaaagccggctttgcgcatctgcaggacttagaaggtcaaattcaaatttacgtaagaaaagacagtgtcggcgaagaacaatatgaaatctttaaatcttcagacctcggagacgttatcggcatcacggggaaagttttcaaaacaaacgtaggcgagctttctgtcaaagcgacatctttcgaactgctgacaaaagcactgcgtcctcttcctgataaatatcatgggttaaaagacgttgaacagcgttaccgccagcgctatctcgatctcatcgtaaaccctgacagcaaacaaacgtttatcacacgcggcaaaatcatccaagcgatgagaagatacttagatgaccatggatacttagaagttgaaacacctacgatgcacagcataccgggaggagcgtctgcacgcccgttcatcacgcaccataacgcactcgacatgcctctttatatgcgtattgcgattgaactgcacctgaaacgcctgattgtcggcggattggaaaaagtctacgaaatcggccgcgtgttccgtaacgaaggtgtttctacacgccacaaccctgaattcacgatgatcgagctgtatgaagcgtacgccgattataaagatattatgagtcttacggaaaacctcgtagcacatattgcgcaggaagtgcttggaagcaccacaatccagtacggcgaagagcagattgatctgaaacctgaatggaaacgactccacatggtagatgcggtcaaagaagcgacaggtgtagatttctggaatgagatgactgttgaagaagcgcgcggtcatgcaaaagagcatggtatcgagatcacaaactcaatgacggtgggtcatatcatcaatgaattcttcgaacaaaaaattgaagaaacactcattcagcctacatttatttacggccaccctgtagagatttctcctcttgctaagaaaaatccggaggaccctcgctttacagaccgttttgagctgtttatcgtcggccgtgagcacgctaatgcgtttacggagctgaatgaccctattgaccagagggaacgctttgaagcgcagttaaaagaaagagaagaaggaaacgatgaagcgcatatgatggatgaagacttcgttgaagctcttgaatacggcatgccgccgaccgggggattgggtatcggtatcgaccgccttgtcatgctgttaacaaatgctccgtctatcagagacgttttattattccctcaaatgagacaacgataataaaagggaaggcgccgtttctgcttatcgcagtacggcgcttttttagaaacaagccgctcgtaaaacttttttgattttcttttaaaaaactattgcactattatttgtgaggtggtatattattattcgttgccgctaaacaaggcgctgacgaaaaaagaaatttaaaaagttgttgacttcaagagattgataagatataataataaagtcgcttgaacaaaagacaaaatgatctttgaaaactaaacaagacaaaacgtacctgttaattcaaagttttaaataaatcgcacagcgatgtgcgtagtcagtcaaactactttatcggagagtttgatcctggctcaggacgaacgctggcggcgtgcctaatacatgcaagtcgagcggacagatgggagcttgctccctgatgttagcggcggacgggtgagtaacacgtgggtaacctgcctgtaagactgggataactccgggaaaccggggctaataccggatggttgtctgaaccgcatggttcagacataaaaggtggcttcggctaccacttacagatggacccgcggcgcattagctagttggtgaggtaacggctcaccaaggcgacgatgcgtagccgacctgagagggtgatcggccacactgggactgagacacggcccagactcctacgggaggcagcagtagggaatcttccgcaatggacgaaagtctgacggagcaacgccgcgtgagtgatgaaggttttcggatcgtaaagctctgttgttagggaagaacaagtgccgttcaaatagggcggcaccttgacggtacctaaccagaaagccacggctaactacgtgccattcgactaggccgtcttctgtccagcgtgcgatatcgcccgtctgatacatgcgttctcccgggtaaaacggatcatcgagaaaacgctcctccgtcagctcaggccggttcagatagccccgggccacccctgtccccgcgatgtacagctctcctgccacgcccgcaggctggatggttcctccgctatctaatacatacagacgggcacccggaacgggttttccgatcggaagccttgtccgtccgctgtcccgttttcggtcacagacgtaaaacgccgcatcaaccgtcgcttctgtcggtccatagccgtgaataagcatcgtctccggcaacagatctgcaaaccgggcagccgtaagcggggaaagagcttcgcctccggcaaacacgcgtgtcagtgttctgccgaggcgtgttcttgtttcctcaggctccgtttccagcgcgtctaaaaagctgttgaccattgccggaataaaatgcgcggtcgtcaccttttctgaggcaaacgcttcaatcatccgcacaggatctttctcccagccggccggaagcagatacacggaggcgcctgacatcgtccaccaaaacaattgccagatggaagcgtcgaaagaaaaggatgatttcagcacgataatatcctcttccgtcaacgggaactgcccttgcatccctgataaaaaggcggcggcctgacggtgttcaacagccactcccttcggtgttcccgtcgaaccggacgtataaatgatataagcgagcgaatcgctatccgcttcgtcagagacagcccctgtctccgtctcgcctgtcagagaagaaagagacacttcaagcgtttctccggaaaaaccggaaacggataaccccggctgtgcaagcaggagacaagcgccgcagtcatcgagcatatagcgcagcctgtcctcaggatactccgggtcaagcggcacgtaggcgccgcccgcttttaacacggcaagcacagaaaccaccatctccggcgagcgttcagcgagcacgccgaccatgctttctttgcggacgcctttttgtcggagccgaacggcgagcctgtctgtgtactggtcaagctcggcgtacgtcagcataccgcccggaaaacggagcgccggacgatgcggcgaaagcgcggcacggcgggtaaacagcccgtgaagcgtcggagccggcggttcaaccgtttctgtacggttaaacgcatccagcatatttctggcttcacacgcatcaagcaatgcgatctcggaggcgctcatttcagggtcggaaatgactgacttcatcatatgccgtaaaaatgtttcaatattcttcataaaaacacgatcgtatataccggtatcaaagtttaagcggatataaagagaatttcccggaatcacctttatgctgcatccgtagtttgtgacttcctccatcgtgaaatcttctaccgcaaaatcaaatgaacctgcctgactcacattttcaatttcacgctgggccggcacattttcaaacacgataatgtggtcaaacagcgcttgcttcaaagggctttgcgcctgaatgtcatacagcggataatagctgtacgcttctgcttgcagcgtctcctgctgcaaatgcctgacgagctccagaaaagaaaatgaaccgcttttcacccgcacgggaatcgtattaataaacaggcccaccattttttccacgcctgcgagatccgacggccggccggaaacgacagaaccgaaaacggcgtcatcacagcggctgacacgctgcagcaacaggccccacagtgcctggaacactgtattcagcgttgctcccgcccttgccgcaatgttcttcagctcatttgtctgctcttcagaaatggtgaaaaccgcctgctcaagttcgccatttggttctgcagattttttcggaagagacgccgattgctcaagatcggcaagtctcgttttccaaaaaatctcggcttctttacgatcctgcttcatgagccatttaatatactttccatatggctgaacaggctcgagagacgggagccgtccgtctccgagagattgatagatcatcagaaattccttcatgacaattccgaagcaccagccgtccatgacgatatgatgatggctccatatacaaacatagcgttcaggcgcttttttcaaaatggagactctcatgagagggtctgattgcaaatcaaagcctttatctttatcttcttttctgaatcggtcggcatatttatcttgtgccttctcgtccaaatgagaaatatcatgaaactgaacgcggctcggcctgtttttcaacacgacttggcggggcttcgccacattcttatgaataaatgtcgtacggaaaatatcgtatcgttcaaaaacagcatctatacttttttggaatcgttcccggtcaagctgtccgctgatcgtaaacaccgcttgttcgaagtaggctcttgagtcatgatccaacagagaatgaaaaagcatgccctcctgcataaaagataaaggatatatatcttgtatttccggttgctgccccattgcgccactccttttctatagtttgttgacggctcccataatgtcactcagatcttccagcgttaactcctcgtcactgaaatcagcggcgctccattcacgctcctctttgcctgtgcaatgcgtgatgatttgcttgagaaaggcatgaaaatatcccgtcaaaacttcaatcgtttctttttgatactgaaaacggttgtacacgacatgcatgctgagacattccgacgatacggagccgctgatatcaagtgtgtacggacgttcccagtctgggctgacttcatttcccgcttttacgggagaaacaccaaagccgctggaacggatttcacggtcaaactgtcccagatagttaaaactgatttcaggagaatcggattcagtctcttcccagagtttgcttatatacttcagcaccccgtatcccgctcctttatgcggaatgcggcgcatcatgtcttttgtccgcttaatgtgatagccgagccgctcgccgtcatcagcctgatcttgaaaacttgcgtcaaccaataccggataaattgacgtaaaccaaccgatggttctgctgatatcaagatgctccaagtgctcttcccttccgtggccttccatgctgattttgaatgtctcgtttccggtccatctgttcagcgcaaggcttaacgcggcaagcaataattcacccgtctctgttgtgtatgctctgttcgcttccgttaacagctgctcagtctcctgtttcgtcaatgtaacggtcatcacatctgtatctttcagaagattggaagagatgcgggcatctttcggaagcggttcgaccgccgctctttctctttcggaccagtagtctgcttcctgtaacagccggcggctttttgcataatcagagatttgcttcgcgtaagtctgataggaatcggtttttgccggaagcgcggtttcttttcctgcgagcgcctgcctgtagcacgcggtgagatcttcaaataaaatccgccatgatacaccgtcaatgacaaggtgatgaatagaaagcagcagatgatcgccatcattagcgtgaaataatccgacagctacgagcggacccgtctccagccgaatggaagtttgaatacgggcggccgcctgttcaattgcggcgtgctcctcttgtaatgaccctttccctctcacgtcatgcgtttcaaacgtaaagagttcttcttcagaaaggttttccgctctgttgtattgagtcaccgatccgttttgcgtgccgcatacgatccgtaatgcgtcatgatgaaccgcgagctgtgccaacgcttttctcatagcagattcattgattctgtccgcactgcggagcattacggactgattaaaatgatcatgcggcaatgattgcgacaagaaccagtgctggatcggcgtcagcggcacgtctcccgtgacgggagcctgatcaatcacgcggcggactttccggagccgcatcgatacttctcccagtgtctgatgctcgaacagctcgcggacggtcgtttcatagccctgctgtttcagcctcgcacatacttgcagcgctttaatcgaatccccgccgagatggaagaaatgagcattggggccgaggccttcaacacctaagagttcttcccaaatgtcagccatcatttcttcagtttcatttctcaggctgatatcatctccaaggctatcatttaattcaggctgcgggagcgccttctcgtccagcttcccattcgccgtcagaggcagttcatcaagctctatcaagcgggcgggaatcatatattccggcagaaaagctctgagagaggcctgaatctctgcttcttttatcttttcgttcccgtgtaagaccgcgtatgcgtaaatggagtgctgaccgtgctgatcagcacgtgtgatcacggcggcctctttcacggaggaaagctcttgcagcgctgatttaatttctcccagctcaattctgtggcctctgacttttacttgcgcatctttccgcccgacatattccagctctccatttgagagtcttttggcgatatcacccgtccggtagagccgcatgccggaaacgtgcggattcgtgatgaaacgggaggcggttaaatcatccctgtttacatatcccctcgcgacgccttccccgccgatataaagctcaccgggaattccgatcggctgcggattcatataggcgtccataacaaaagcatgaagggtttccagcggtctgccgatattgcttttgtttctctcaatatcatccatattcagttttttgcatgtgacgtgaaccgtggtttccgtaataccgtacatattaacaagctccgtctccgggtacttctctttccagcttttcagcatgccgggctgaagcgcttctccgccgaaaatgacatatcgaagcttcagcttgtccgtatgcccggcctcttcatgaatgagtccggaaaaagccgtcggcgtttggttcagcaccgttacgccttcactttgcagcagctgccggtacaaatacggatcacgggctgtgtctttcggcacgataactacctttccgccgtataagagcgcgccgaatatttcccagacagaaaaatcaaagcaataggaatggaacagcgtccagacgtcttcagagccgaaatcaaacggcagtcctttatgtgtgataagactgatgacattgcggtgttccgtcataacgcctttcggttttccggttgtgcccgatgtgtaaatcacgtaagccggctgttcaggcgttattatttctttcgttctgtctgctgaaacggattcaggcttatcgatgtataaaaccggcagcccgtccattccggatatcccaagacccgattgcgtcaacagagcacgcgcgccgctgtcagtcagcataaatgaaatccgctcgtccggatagtcaggatcaatcggcagataagcacctcccgcttttaaaataccgagaatcccaatcagcatatccggagatcgttcggtcataattccgacaatctgtccggagcggatgccgttttccgacagcatatcggcgattcgatccgccttttcattgagctcgcggtaggtgagacgctcatcagacatgacggctgcaatttgatccggcattttttccgcctgtgcttcaaataaactgacaatcgtttcatgcctcggatactccgccgtttgattttccgcttgaagaagcatctgccgctcgtttatgcccagcaaatgaatgtcagacagcttccgctcatcatccgatgcgatttgtcctaaaagctctttaaaatgaccggcccaccgttcgatcgtatccttttcaaacaacgcggtactgtattcaaaatgaaaatccagtgagccatccggccgttcctcggcatgaagcgtcaagtcgaattttgaaatgtcatgcttcactgcatgtgaagaaacggataagcccggaaggttcacttcgaaatcatcactgttttgcaaaacgagcatggcatcaaacagcggattgcgattgacttcccggtgtgtatcaagcttttgggcaagttcttcaaacgggaagtcctgatgttcggccgcgccgagggcgagcattttcacctcttctaaataagcgcggaatgtcttatcccctttcggcctgcttctcattgccacggtatttacaaacatgccgatgaccccgtcaagctcagcgcggcttctgccggccgcaggtgaaccgacgacaatgtcttcctgcccgctcaatttagaaaggaacaaggagtagcttgccaaaagaatcatatacagtgtcgaacccgtctcatccatgagctggcgcaagttctccgccgtttccttttgaaggcgcgttcgaaccgcggacccgctgaaatcaggaagctgcgggcgctttttatcgagcggcagatcaagtacgggaatgttttccccgatcgtctccagccaataacgctcatgtcttttgaattcttcagcggcaaaccgctcatgctgccagacggaaaaatctttgtactggagttttaacggccgcaactcttttcctctgtacaaatccgtcaattcttgaatcagaacgctcattgacacaccgtctgcgataagatgatgcatatcaagcagcagaaaatgacgttcttcagtaactttggctaaagtcactctcaaaagcggcgctttttccacgtcaaacggtttgacgaaagtttccatcacctcttgaagaaggttcccggatggcatgtgaatctctgtgaggtcaagatcgacatgtgcatgtatttgctgcatcggctccccgtttcgtaaaacaaatgaagtgcgtaacgcttcatgcctttgtaacagcgctgaaaaggcttcgtgcaggcgatcccggttgagtctgccgctcagttccagacaagcgggcatatgatagcccgtactgtccgctgcaagctgatgaagggcatagagccttttttgcgcaaaagatagcgggtacaagtcctttgccacagcaggcgtgatttctgcatattctcctcttttcctctgttcaaggaagcgggccatgctctcgatggtcggatgttcaaaaacatggcggacggcaagttcaatttgcagccgtttatgtatgtttgaaacaagcgacgcggctttcagcgactgtccgccgatttggaagaaatcatctctcatactgatgtgttcccgtttcagcacttcttgccaaatagacagcagctcagtctcaagcattgtgcgcggagcttgataatcaccggttctctcggcttctttcggctcaggaagtgcggcccgatcaagttttccgctcacagacagcggcatttccgttaatttggtaaagcttcccggtatcatataagcaggtaatctcccggccaattcagcgtgcggtttaaatgtcacacccgcattttccagtacgacataagctgcaagctcctgttccccgtccgccattttgcgcacggtgactgccgcctcttttaccccggacagacttctgagtgccgtttcgatttctcctaattcaattctgtaacctcttaccttcacctgatcgtcaaagcgtcccatgtattcaatcgttccatccggtaaaaatcgggctgcatctcccgttctgtaaagccgttcaccttcacgaaacggatgaggggtaaagactttgtccgtcagctctttttgctgaaaatatccgtccgccagaccttttccggaaatacacagttcaccgacggctccgaccggctgcagccgatctccgtgcatcatatagacagaagtgttggcaatcgggcgcccgatcgtaatccggctgcttttttgcaggttgcgcagaatcgtcgtggccacactgttttccgtcgggccgtattcattcagcagctcggcattcgggcatatgccgcggctcgcttccacgatatcaggagtggccgcttccccggcaaatgtcaccacccgaagcgtctgcgcatcctttttcgtcagcgaatcaagcagaacgcgatacagagacggaacgatcagaagatggctcactccgtgtcgggtgattttctgttttattgaaaggacgtctttcgcatcatcttcatcagttaacaatacacaggcgcccgacagaagcggagtgaaaagactcgttaatgacccgtcaaatacgtatgaaaaaagatgaagcgctatgtccccttctgtcatcccgtattcttcacgccgccattgcaatgtattgctgatcgctttgtgttgtacaagcacccctttcggccggcctgtcgttccggaggtgtaaatgacatacgcccaatttccgctgtcagataccggcggaagcggtgaagtctgctgggaaaccgtttcctccatgatgacgacgctgcccttgaaatgcggcggaatgagggggagcaggtctttttcagtcacgagcagtgaggcttcactgtctctcagtaaaaatgaaatccgttcaggcgggaattccgcatcaatcggcatataggcgctgcccgacttccaaattccgagcagagcggcaaccgtactcattgatcggcgcagcataacagcggtgatctggtcggggcgtgcgcctttttcccttaacgcatgcgcaatctgattcgcccgctgatttaatttcttgtagctccagcttaccccgttatatctcaacgcctcttggtcaggcgtttttgccgcctgttcttcaaacagcccatgaacggttgtctcagggtacggacggttcgtttcgttaaacgaatgaatcaaggcttcttcctctggaggcacgagactgatgcttgataaaagcctgtccggatcttccgttacacaggagatgacctccagaatatgccctttgatccgtttcatgtcttcccgatcgtagatgcccgcattgtagctgaatttcacataaaactcttctcccggaacgatgacgacgttaagatcgtaattggtttcttccgccatcgaaaagttttcaagtgagagcgcactgctttccgtttgcttccagccgtttaccgcagtctgcatctgaaccggataattctcaaaaaccaggatgtggttcaagagatcttgttgcaggccgctctcgttttggatgtcataaagcggataatagctgtgctcttccgcagcgagtgactctttctgcacctttttgagaagagaagaaaaagtcatatcccgagccgcgcgcacccttatcggcacggtattgataaacagtccggccatggattcgatgccggcgatagctgacggcctgccggaaacaactgaaccgaataccgcatcttcagtgccgttgtaacggtggagaagcagtccccaaatgctcgtaaataaagtattcagcgtgaccccggtgcttcgggcaatgtctgtcagcttttgcacggtttcagactcaagggaaaattgaaaatgctcagatgcataaccgttttgcgccggcttattcttcgtttgcggaacggaaacgacttctccgtaatcttccaagcagcgcgaccagaacgctgacgtttcttctttattccggcttcggagccatttgatataagaactgtaaggagccggactgctgaggtttacaggccgcccgtttcggatcgcataatacatgctgaagaaatctttcagcacaatgcccaagctccagccgtccatcataatgtgatggtgagtccaaacgcatgtatggcggttttctcccgtttgaaaaagagtcaggcgcattaaggggcctttttgcagatcaaagcccttattccggtcggtttccttgaattccttaatgatgttttgctgctgttcttccgaataatctgaaatgttctcagtctgtacggctgtgtcacggcgtgaaaggacaacctgctgcggcccttcaaggtcaggcacttcttttatgaaaatcgttctgaaaatatcataacggctgacaagcatatccagacttttttggaatgtatcaatgcataaatccccgctgactgtaaacgaaatctgctcgacatatgcgtttgatccggaatccagaagcgaatgaaacagcatgccttcctgcatatatgataaagggtaaatatcttgaatttctgtcgcttgtgtcacgaatgccacacacctttttatgaaattaaagtccttttacgagatcttcaatgcttgatagtgcttgagcggtcaattctgtatggctgtaatccgttaatgttttttcccgctctttcttgccggaacagtgggcgatgatgtcctcgatgtgagtatggaaacgattcatgaagaactcgattgcccccggtgcaaatacatcggtataaacggcttttacctccagttgcccggccgccaccatcgcgttaatatccagatcaaactcgcggatgcgcccggccgctatatcatgctgcggcttgaacggtgacatcttcagcgttccctcaagaccgtcaaacgcaccgagatagttaaagcttatttctgggtctttataaagaatgtttcgcgaatatctcaacagcccgtagccggttccgtgataaggaacccgtctcatcatgtcttttaccgtctttatgcggtgagcggttttttcgcctgagccgcccggcactctcatatccaaaagcaccgggtaaacagatgtaaaccatcctgctgttcttgacatatcaatgtcaggcatatgcccttggcgcccgtgcccttcagtgctgataaggatctgttcagaacccgtccactcatgaagcgccattccaagcgccgttaaaagcaattcatgaacatccgttccgtatgcctgctgtgtttccaacagcagctgtttcgtgacttcgctgcttaatatccacgatgccgtgcgcgcgttttcctgcaatcgtccggcgttttcatcagttattttcggcagcggcgctgtttcactagacatcacgctgtcccagtatgcggcttcctccagcaatgctttgcttttggaaatgtcaaaaagctcttcggcatactttatataagaatcgcttttcggcggcagtttgatttgtttgccttccaatgcctgctgataagctgtctgcagatcttcaagcaatatcctccatgacacgccgtccacgataagatgatgaatcgttataagaagatggtcggcttccttctgccggaacactccgagatgaagcagaggcccttgatcaagacgcatagcctgctgtatttctttttcctcagcggctatccgtttttcgggctgcgtttcttctgaaatatctatgacgttaagcgtaaagatttcttcatactgctttgtgattccgcgattatattgaaccgtttccccatgctcattttcagtgaaagtcattcgcagcgcatcatgatgttctgtcagcgcgcaaaccgcctgatacagcgcatctatttcgaggctgtcttcactgcacagcatgaccgcttggttataatgaagctcaaacgcacccggctcctcaaaaaatctctgctggatcggtgtcagcggagcgcttccttctatcggcccctgatcagccgttgcaacagccggcatgaggtgcttcgcgagttctgcaatcgtcgggaactgaaacaaatcgcggatcgacatgttccagccttctcccgcgagtcgggctgacacttgaagcgccttaatggaatctcccccaagctcaaagaaagagtgatgaattcccgctttctgaacatgaagcacatcttcccaaatccggcataacatctcctgtttttcatcgccgggcgcgacaaatgcctgtgttgaatgtatctcttctgccggcagtgccgatttgtcaagtttgccgttcagtgtcaggggcatgctgtctaaaccgataatatgagacggcatcatataagccgggagctcctgcataagagactggcgaagtgatgagatatcggcctctttaggaacgatgtatgccgctaatcgggcttgtccttcagcatctttcatcacggtaacagccgcttctttgacttgatcgtgtttcaaaagcacactttcaatttctcccgtctcaattctgtagcctctgatttttacctgcttatcaatccgcccttgaaaacgaagagtaccatccggcagccagcaagcctgatctccggttctgtaaagcgtttctcccgtttgtaacgggtcactgaatgcgtcctctgtcagctcaggctgtccccaatatccttttgcgacgccggcgcccccgatatacagctctccgaaaacgccgatcggctggatctgtttgtctttgtttaagacgtacatttgcacattcggaagcggaacaccgatcggcacatcatcttcccgcggctcttcgctcatttcggcttcataatacgaagaatcaattgtcgcttctgttacaccgtagctgttaatgatccgcatttcttttccgaagcgttcatgaagcgtataaaaatcctgcgacttgatcatatctgaacccagtacaagtatttttacactttgcagcgcgagcttccggcgatatatatattccataaacggaactaccagcgcgggtgtcgactccataaacgtgatacggtgctgatcaatgagccgataaagctgttgtggctcaagccggacgtcatccggacaaatgacaagcgttcccccgtttagcagggcacgtgcaagatcccctgaaaatacatcaaatgagaaactcgccatctgcagcactcggactggtttacgatcaagctcataaattttccgccatgcaagtgctgcatgcgtaaagctgagatttctgacttcgactcccttcggcgttcccgttgttcccgaagtatatatgatatatgcagtatcatccggtgacgctgccggctgaatattctttgcacaaatatcgtattgatcttcatgatcgagctgaatgagaaataaattgttatccgtcagctgtgaagcaagttctttgtattctgactgcaccatcaagacggatgccgcgctgtcttttaataaatagcgaatccgttcctcgggataatgggagtcaaccggtatatacgcccctcccgatttcatgacggcaagaacactgacgatcgcttcaatcgagcggtttgccaatatagctgctctttttcccggaccgaatccatttttgtgtaatgttcgcgcaagccgatttgcccgctcattaagctgcgaatagctgatctgttgtgctccttcaataacagcggtctgatgaggcgtttcttctgctttctcttcaaacagctggtgaaacagtttgtgtttttccatgaattcggtttgtgtgttattaaactcaatcagtaacttttgtttttcttcttcatccaaaatgtcagctttcgatagtgtgacttccggttcggcggcaacatggcgcaagagattcagtaagtggcccatccagcgttcaatcgtttctttcttaaaaagctcggtgctgaattccatttcaaagcggatgtttccatcggattcagccgctgataaggtcaggtcaaaacttgatacatcatgttcggtatgctctgatcgtgacgccttcagaccggccagatttatttcctctcgctccatattctgaagaataaacatcgcatcaaacagcggattgcggctcatgtcccgctgcaccccgagccgttccactagctcttcaaacggatagtcctgatgctcatatgcctcaagcgcggcctggcggacttccgccaagtaatcggtaaaccgtttgtctcctttcggctccgttctgatggcgagcgtgttgacgaacatgccgagaatcggttcaaggtctttgtgcggacgcccggcaatcggcgagccgacgatgatgtcttcctgcccgctcaatctcgcgagtaacgtattgtacgcggcgagaagcaccatatacaaagtggagccgtgatcccgggcgattcggtgaaggccggatgccgtttcagcgtcaagcgtgcacgatacgctgccgcccgcaaagcttctgacagccggacggggcttgtcagccggaagctcaagcaccggaagctctccttctagccgcttcagccagtaggcttcctgcttctggtacccttctttctcctgaaacgaccgctgccagacggcatagtctttatattgaaggcgcattggcgcaagcgaacggcctgcgtacagctcgccgaattctttaatcaaggtgttgacggacacaccgtcagaaataatatgatgcatatccgttaataaaagatgacgttcgtccgattctttcacgagggccgcacggaagagcggcgcttcctccagacaaaacggccggacgaatgcgtcagctgacccggcctcatccagctgaaacggtacgctgtcatggatgcgctgcaccggttcgccgtcaggccccgtttcaaaggacgttctgagcgactcatgccgctccacaagctgccggaacgtctcctccagccggccgcggtcaagcggacccgtcagttccagcacagccggcatattgtagccgacaccgccgtcttcaagctgctggagcacatacatccgtttctgcgccgaagacaaagggtaggtgtcctgtgtttgcgcaggctgaatcgcttcatacgggctctcttccaagtcctgaataaccgaagcaagctcttccaccgtcggccgggcgaagatgtcctgtaacggcacctgaacaccgaattctttggcgatgcgggagacgagagctgtcgcttttaacgaatggccgccccgctcaaaaaagtgatcccggatgccgacggggccgtttttcagcacctcttcccaaagggcgcaaagcttcatttccgtgacgttccgcggggcggtgtacgcctgtctgtctgccgctccgccgggagccggcagcgcgcggcggtcaagttttccgctcggcgtgaccggccattcgctcatctctataaactgagccggcatcatgtaggccggaaggcgtgtcgcaagctccgcccgcacgtcatcgctttcccgtccttcgatataggcgtaaagcgcggtttcgccgtgttcgttccgggcggtgaccgccgcctcacgaatgccgtcgatgcgccggatcgccgcttcgatctctcccggttcaatccggtagccgcggactttcacctgtccgtctgaacgtccgagccattcgactaggccgtcttctgtccagcgtgcgatatcgcccgtctgatacatgcgttctcccgggtaaaacggatcatcgagaaaacgctcctgatcgccgtcgccgagaatataaactctcgtattggcaatcgcccgtccgatcgaaagcgatccttcctccggattgatgacgccgcttgtcgcgacgacggtgttttccgtcgggccgtagttgttgacgatcgtgtacggctgtttcaccgcccgcttcagcttgtcgccgccgacgagaagcatgcggagagaggtattttccagctccataaattgttcggccagctgcgtcggcaggaaggtgatggtcacgccgtgctcttcgaaatagtgatttaagcgggtgatatccagccggatcgcttcgtcaatgacatgaagctccgcgccgatggtccatgtcgggaacatctcccagatggaggcgtcaaaaccgaagcccgcgtatttggcgcttttatcatccgccgtcatggcgaatgcgtcgtgatgccagaagcacaggttcaccagcgcatggtgttcgaccatgacacccttcggctgtccggtcgttcctgacgtgtaaatcatataagcgagatgatccgccgttgtttccgtctgcgggttcgcttcatcgttttcatcaagcggcaggctcagaatggagcggctgccgtcaagcagaatcgtttctccgttgtagctttccggcacgtcgagcgcttcctgtgtgagaagaagcttggcgccgctgtcctgcagaatgtagctgatgcgctcttccgggtagtcggggtcaatcggcacaaatgccgcgcctgctttcaggacgccgagtacgcccgcggccatttccaaggacggtttcgtcaaaatgccgacacgttcgtcagccgtgacgccgcagtccatgagaatgcgcgcgatccggttcgcccttgcgttcagctcgccgtacgtccatttcgcgccgttgtatgccgcggccggccggttcgcgtagcgggcggccgtttcttcaaagagacggtgaaccgttttgtcccgcggcacagaaattgtttttcctttccatgcgttgaggagggcttgtttttcagcatcgctgatcagtgaaatctcaggcagctttctgtccggactttctgccgcttgcttcagaatccgcaggaacccggcgctccacttttcaattgtttcttttttaaacagatcagtcgcatattcaaactgaaggccgagaccttcttgatccgtaaagccgccgagtgtcagatcgaatttcgccgtgccttggtttgactcatacggagtgatgcgcaggttctccagttccagtgtttctttatccggatcttctgtcgtcaccatcacctggaacaatgggttacggctcatatctctcggcaggtcaagctttccgatcagatcttcaaacggataatcctgatgcgccagcgcgtcgagattggtttgtttcacccgttcgagcaacccggcgaaggtctgctcttttcgcgtttcattgcgaagcgcaagcgtattgacaaacatccccggcatttcctgaacttcggcgctcgttcttccggcggtcaccgagccgataatgatatcgcgctgccccgtgattttgctcaaaaagacatggaacgcggcgtgaagcaccatatgaagagtcgctcccgatgattccattaattcacgcaccgctttttccgtttcacgccccgctctgaaacggacggattgtcctttaaaactttgaaccggcggacgggggaaatcggtcggcagattcaattcaggaagctcgccggaaaatgcggagagccaataacgctcatggtctttcatccgttcggcctgctcgggttcattctgccagacggcgaagtctttatagtgcaggttcggcgacggcaggcttccgcctttgtaaagatgagcgagctctttgaccagcatgcttctggacacgccgtcggcaataatatgatgcatatccagcagcagcaggtgtttcttttcattcagtctgacaagagcggcccgaatgagcggagccgcactcagatcgaacggcttaatgaatgcctgaatgataagatccgctttctcctcgtctgctgcttcaaagatgtgcaggtcgatgtcagcctgttctgcgatctgctgcatcgggcggccgttttgatcgataaaggacgtccgcaaagactcgtggcgattgatcatctgattgagcgcttcctgaagccttgaaatattgacttctccttccatcagaagaacggacggcatattataactgattgtctcccggtcaagctggttcaggacgtacatccgtttttgggcggatgataacgggtacgcgtctgcactgtcggccggtgagatcatccgatatccctcagataccgctgatttttcgatatatgcggcaagcaggcggacagtcggctgttcgaacagcgcttttaacggaaccgttttgtccagttcagcctgaatattggcgaggagcatcatgccttttaaagagtgcccgccgtaatcgaagaaattatcgtcgatgccgagcgtatccgtaccgagtgtctgtttccaaatgcggcacagcttttcctccaattccgtttccggcaaggctgaaactgtttgcgccgtttggctgacgcccggtttcggaagggcgtttttatcggtttttccgttggctgtgagcggaatgcggtctacttgcatgaaataagccggaagcatatgagacggcagtgtttcggaaagccgtttgcgaagctcagagcctttcagctcgctgtcggctttataatacgcgcacagttccggcagcccgccttcgctgactgcgagaacgaccgcctcctgaatgccgtttacgcttaacagcacagtttcaacctcttttaattcaatgcggtagccccggattttcacctgatcatccgcacggccaataaattcaatcggcccgtcaggaagcctgcggacgacatctcccgttttgtacatcaggctgtccggtgaaaaaggatttgagagaaatttctccgccgtcagctgcggacggtgaagatatccccttgcaagccccttcccggcaatataaagctcgccgcttgcgcccggaggaacgagctgcattgctccgtccaatacaagcgcgccggtatttgcgatcgggcggccgatgacgggacgctgttcatattgatcaaggcgctccatattgatccgtccggcaatggcgccgatcgtcgtttccgtcggcccgtagtgattgatgaagtcggtatgggcgtatacgtcatgaaacttgcggacatcggacgtgatgatcttttctccgccgagcaccactaaacgaagcgggctgaaacggcgttctgacgtaaaacgggctgtattgacgatcatatggaacaatgacggcgtcagtttcatatacgtaatgccgtttttctgtatatactcaccaagctgatcaggcgcggtgtacgtctctttcggcacaatgtgcagctcgccgcccgcctgaagaatcgggaatatggccgtatagccgagatcaaatgcgtaagaagacagcagcacagatttgtcagcttcggtcaaaccggcttcacggctgaaccatgtgacataattgattagattgcggtgctccagctggacgcctttcggtttgcccgttgttcccgaggtataaatgatatatgcaagctggtcggcgccgggctccgtttcaagccggccggcgctttcgttctgccattctccgtcttccattacgaccgtttttcctttataaacggcggccgcggtcatgtttctttcattgacgaccagaagcttcgttccgctgtcttcaagagagtagcggattctctcttcaggagtctccggatcaatcgggagaaatgccgctccggctttcatgacgccgagaatcgcggtaatcaagtcggccgaacgatccatcataatggctacgatgtcctcactgcccgttccgcaagcctgaaggtggcgggcaaaccggttcgagcgttcatcaagctcacgatatgtcagacttattccgcccgcaaccgccgtgagatcaggcgttttttgcgcttgccgttcaaacagcgaaacaaaagtgccctcaggcagatccgcttccgtacgtttttcatcagaaaggagcgcttcccgttcaggagcggacagcaggcttgcgtcggccagctgaatatccggattgtcagcgcaggctttaatcagattgacaaaatgagcgctccagcggcggatggtttcatccgcaaataaggctttcgcgtaatcaaagctcaatccgacctcttctccgcgttcagccgcttctaaggaaagatcaaatttagcgacatgatgatgcatggagtaagaagaaatctccaaatctccgagccgcagagccgggatctccatgttctgcatattaaataacacgctgaacagcggactccggcttgtgtccctcgttaacggcagtttttcaattaattcttcaagcggatagctttgatgctcaaaagcttgaaggctcgctgttttcacctcatccagaaattgtttgaacgtttttttgccggcaggatgcgaccgaagcgcaactgtgttgacaaacatgcccggcacgtcttggagatcaggatgctgtcttccggccgccggagacccgactatgatgtcttcctgccccgaatatttggacagcagcacttgaaaagcggctaacaagaacatgtacatcgtcgtatctgtatcagccagcagcttcttaatctgcgccgtcacctgtttatcaagcccgaagatgacgcgttccccttcaaaactgcgctcggcaggacgcgggaaatcaagcggcagatccagcaccggcagatcgcctttgaacgtatcaagccagtaggcttcgtgctggtcgagatttgctttttcacgctgccagactgaaaaatccttataatgaatctttggcagcgcaagctccgtgccttgataaagcttcgcaagatcaccgatgaaaatgcccattgagcttccgtccgtaataatgtggtgcatgtcaatcagcagaagatgccggtcttcttcaagccggatcagcttcgaacggacaagcggcgcgcggttgagcgcaaacggcctgataaaggcttttgtcagctcttctgcatcttcttcccggccctcggcggtttcaagctcaaacgacacatttttgtgaatggtctgcacgacttctccatctgccatgtcaaacgacgtacgcaaggtctcatgacggttgattaaagcctgcatggcctcctcaagacgctttttgtctactgacccttccagcaaaagtacagcagggacgttgtagctcgtgctggcctgtccgagctgattaaggatatacatcctgcgctgtgctgaggaaacaggataatgcttctgataaggcgcttgtcggatcggttcaaactgctgctcctcctcgctctcatgctgcaaataatgcgcaagctcctgaatggtcggcttttcaaataacactttaatcggtacttctttttgaaagtgctcctggattttagcggtcatcatcatggcttttaaagaatgtccgccaatcgtgaagaaattgtcagtcacacccgcttttacaccgagaatgccttcccaaatgtcagcgagtttctgctccgcttccgttttcggcgctacgtattctttttgaacggcttcagcctgaggctcaggtagcgcttttttatcaatttttccgttcgccgtcagcggaaactgattcatctggatgaagtgcgcgggaatcatatattccggaagtgattccgaaagcgttttgcgcaggtcttccggcgaaagagcttggtctgccgtaaagtaagcgcagatttcattttcatccgctttatttttccggatcacagccgcagattccgtcacattctccgcctggctgattttcgcctcgatttcgccgagctcgattctgaaaccgcggacctttacttggttgtcaattctgccgagaaactcgatcgtgccgtccggaagccacttcgccaaatcccccgtccggtatatcatttcatccggtctgaacggatcgcggacaaactgcttctccgttaattcaggcaggttcacatagcctcttgccactccgcttccgccgacgcacagctcaccgggcgcgccgatcggctggaggttgcggttttcatccataatgtacgcagtggaatttccgatcggcttcccgatcgggaccgaaccgtcataatcctgatcaatgagaaaactcgtcgaaaacgtcgtattctccgtcggcccgtatccgttccaaagcgacagctccggtgatgcctttctcactttgctgacaatatgcggcacaagcgcatcaccgccgatgatgaggtgccggagcgtgttaaacatgccggcatccttttgggcaagctgattaaacagcggagacgtcagccacatggtcgtgatccgctgctctttcagaaattgggcgaattgtccggcgtcaagcagcgtctcttttttcaccgggtgcaatgacgctccgttcagcaatgcgccgaagacttcgaaggttccggcatcaaagctgacggctcccgtttgcgccatccggtcttcttcatgaaccggcacgtaattcgaatgtttgacgagcctgatgatatttctgtgttcaatcatgacgcctttcggtttgccggtcgatccggatgtatacatgatatacgccaagtcgttgccaccggccggaagattcaagtctgttccgcttaccgtttcatccgcgctttcatccagcatgacgaccgggacttgcaatgcacccgcttgttcttgatagtcctgaactgtcagcacgagccgaatcgagctgtcttccgccataaagcggagacggtcctccggaaaagacggatcaatcggcacatatgcgccgcctgcttttaggacggcaagcattccgacaacggtttccgcagaccggtcgttcataatagcagcggtccggcctttttccagcccgctcttcacaaggtgtctcgccaggcggttggccgcttcgttcacttcacggtaggtccattcgcgtcccgcttcttttatcgcgatgcttgcaggcgtccggtttgcctgtgcttcaaacaaacggtgaacggcctcctcttccggaagcaccgttttcgtatcattgaatatctcaacaatctgccgctcttcttcgcctgaaacaaggccgagttcccgcacgggcgcgtcaggcgttccgaccgcggctttcatcatgcgggtcagatggtgcgccgttcgttcgatggcatcatgagcgaaagccgctccgttgtatttgattttgacagtccacgtttttcccggatacacgatgagattgaaatcaaagctcgtctgctcaaaagcatgttcaactttaatggaaaagccgagtctttcctccatgcccccgttttccagctctttgtccagcggatagttttcaaacgcgaccaaatgatttaagaggctgccgtccagggcggagcgcttttgaatgtcatagagcggcacataatcatagcgctcggcttccacggcgtttttctgaactgccgccatcacgtccgaaaaggctgcatctttgtcaatcttgattctgacgggaattgtattgatgaacagccccgccatcgtttctatgccgttgatttctgaaggacggcctgatacgacggtgccgaacaccacatcgtctgtatagttgtatttgctgagcaccgcaccccaaacggcctgaaacaggttaggccccgtgacttgatgccggttggcggtctgctgaatctgcgcgaccagctcttcatcccagacaaaagaatattcttcattttggtagtctttcttttctgctgccagacggcccgggagcaggctcggctgttcgaaatccgccaggcggctgctccaatattgttccgcctcctcataatcccggcctccgagccatttgatatagtcagagtaaggtttgccctggcttcccccggcgggccggccggcacgaagcgcttcatagttttggaacaggcttttcatcaaaacgcccatactccagccgtccatgacgatatgatgattgctccagacgagatacagctccttctcactgagtctgaacaccgccgctttaaagagaatatctttcgccagatgaaagccctgctgctgcacgccgcgtttatagcgttcaatatattcggtttggcgcgattcatctaattgactgatatcttcatagtgcaccttcgtcttccgctccgccaatacgacttggcgcggtttttgaagctgctggtgcacgaataccgtacgcaaaatgtcatatgtccggatcagctcattgacgcttttttcaaaaagctccagctgaaagcttccgtgaatcctaagctctaattgtgtgaagtaggaggaagaatgcggatcaagcagcgcatgatacagcattccctcctgcatcggtgtgagtgcatacaccttttgaatcgattttttgctcatatgtcacctctgtcttttctgttagagaatttccattaatttatcaagttcatcaagcgtcagatcatcatcgccaagatcgctaggcgtaagctcaggtccgtcttgggccaggcagtgatctatgattttcaagaggtgccctttaaaactgtcactgaacgattgaatggttttttcatgaaattcgagagaatgataggcaaacgtcatcgtcatctgcccattttctataaatccgacaatatcaagcgcattcggcttctctgtgtcagggctcagcgattgtcctgacggcatcccggatcttgtaaataagccggaatccgacatctcattaaactggcctaagtagttaaagctgatatccggatcaatctcaaatgaaagattctctttatgctcaggcgccgttacataacgcagaatgccgtagccgactcctttgttcgggatgtgtctgatgtcttctttcatttgtttcagctgatatgaaagatcgtcggcgtgcttcatctcaaggatcatcggatacatgctcgtaaaccatccgaccgtccgggtgatattcaggccgtcaagaatgtcttcgcgcccgtggccttccaaatgaacgccgatcgtgtcttcacccgtccactctttcagcgccagtccgagcgccgtgagcaggatgtcgttcatttcggtgtgataggcttcatgtacgtttgtcgtcagctgttcagtttgttcaggcgtcagagagaagctgaccgttctcgtatgtctcatgcgctgatcaccagactgcctgtctttcggaagctgagtgcatacctctttttcctcaagctctctccagtaatccgcttctttcagaaacgccttcgtatttgcgtattctttgattctctcggcaaattcggcgaatgaatgtgttttcggcggcagcgcgggttcattgccttgcttcagctgcgtataaacggacgtaaagtcctccagtaaaatccgccaagatacaccatccacgactaagtgatggattgcgagaagaaggtggtctccatcttcagcccggaagagcccggctttcaagagatgtcctgtttccagtgaaatactgctttgaagacggtctgcttccctttcgatacggtcctcatggtcttcagcaggtccgttcagctcaaagacgttcagttcaacagacgcatcctcaagccctctgtaatacggtttttgttcacgataaatcatccggagcgcatcatggtgaaccgtcaggacatgtaatgttttttctgttatctccggatcaaagccgtctttcgcgtgaagcatgacggattggttccagtgatgtttgtcggtaaagtttcgttcaaagaaccagcgctggatcggcgttaagtccgcttcgccttcgacagggccttggtcggcctgcttgccttccgtccgctccacgtaggagacgagctcttcgatggtcggatgctggaagaggtctttcatctccagcttgtagccgtgctggttcagacggctcgccatttggatgcctttgatcgagtccccgccgagtgtgaagaaattatcgcttacgccgatctggtcaagaccgagcacttcctgccaaatgtcggaaagcagcgtctccatctccgtttccggcgctttgtacgcggcgcttcccgcttcaatatccggttccggcagggcttttttgtcaatctttccgttcgcggtgaccggaagctcgtccatctccacccagaaagccggcaccatgtagtcaggcagcgtgtctttcagcgcggatttgagcgtttcgatatcgtcctgctgaggcgcgacataggcgcaaagcgcggtattgcccgctttgtcttccacggccgtcaccgctgcgtcatgaacgtccgcaagctgggcgaggcggacttcgatttctgaaagctcgatccggtagccccgcactttgacctgctggtcaatacggccgatgtattcgatgccgcactgcgcgttccatttgacgaggtcgccggtccggtacatgcgctcgcccggcacgaacggatctgcggtaaaccgcttcgccgtttcttcttcacggttcaggtatccgcgcgccagaccgcggccggccacacacaattcaccggcaatgccttccggctgcacctgatcgccgtcgccgagaatataaactctcgtattggcaatcgcccgtccgatcgaaagcgatccttcctccggattgatgacgccgcttgtcgcgacgacggtgttttccgtcgggccgtagttgttgacgatcgtgtacggctgtttcaccgcccgcttcagcttgtcgccgccgacgagaagcatgcggagagaggtatccaatgaccctccccggttgagccgggggctttcacatcagacttaagaaaccgcctgcgagccctttacgcccaataattccggacaacgcttgccacctacgtattaccgcggctgctggcacgtagttagccgtggctttctggttaggtaccgtcaaggtgccgccctatttgaacggcacttgttcttccctaacaacagagctttacgatccgaaaaccttcatcactcacgcggcgttgctccgtcagactttcgtccattgcggaagattccctactgctgcctcccgtaggagtctgggccgtgtctcagtcccagtgtggccgatcaccctctcaggtcggctacgcatcgtcgccttggtgagccgttacctcaccaactagctaatgcgccgcgggtccatctgtaagtggtagccgaagccaccttttatgtctgaaccatgcggttcagacaaccatccggtattagccccggtttcccggagttatcccagtcttacaggcaggttacccacgtgttactcacccgtccgccgctaacatcagggagcaagctcccatctgtccgctcgacttgcatgtattaggcacgccgccagcgttcgtcctgagccaggatcaaactctccgataaagtagtttgactgactacgtacatcgctgtgcgatttatttaaaactttgaattaacaggtacgttttgtcttgtttagttttcaaagatcattttgttcactttctcaagcaactttttaattatataataagtttctcttaaagtcaacatgttttttataaatggtggagcctagcgggatcgaaccgctgacctcctgcgtgcaaagcaggcgctctcccagctgagctaaggccccgaagtggtcgggaagacaggattcgaacctgcgaccccatggtcccaaaccatgtgctctaccaagctgagctacttcccgatttttaaaaatattatggcgcgcccgagaggagtcgaacccctaaccttttgatccgtagtcaaacgctctatccaattgagctacgggcgcataataatgaatgccgagggccggacttgaaccggcacggtagtcacctaccgcaggattttaagtcctgtgtgtctgccaattccaccaccccggcgcggatggtatagttggagcggaagacgggattcgaacccgcgacccccaccttggcaaggtggtgttctaccactgaactacttccgcatacaggataactatcctgcataatgcgggtgaagggacttgaacccccacgtcataagacactagatcctaagtctagcgcgtctgccaattccgccacacccgcgtaacatggtgagccatgaaggactcgaaccttcgaccctctgattaaaagtcagatgctctaccaactgagctaatggctctttttaaaagacttatgttattatcttgtccaaaaacagtgccggccagaggacttgaacccccaacctactgattacaagtcagttgctctaccaattgagctaggccggcaaatatggtggaggatgacgggctcgaaccgccgaccctctgcttgtaaggcagatgctctcccagctgagctaatcctccatatattacacttacgtgtaatggcttggcggcgtcctactctcacagggggaaacccccgactaccatcggcgctgaagagcttaacttccgtgttcggcatgggaacgggtgtgacctcttcgctatcgccaccaaaccattgagagtgttctctcaaaactagataacagtaagcatacattcaaattggttaagtcctcgatcgattagtatctgtcagctccatgtgtcgccacacttccacctcagacctatcaacctgatcatctttcagggatcttacttccttgcggaatgggaaatctcatcttgaggggggcttcatgcttagatgctttcagcacttatcccgtccgcacatagctacccagcgatgcccttggcagaacaactggtacaccagcggtgcgtccatcccggtcctctcgtactaaggacagctcctctcaaatttcctgcgcccgcgacggatagggaccgaactgtctcacgacgttctgaacccagctcgcgtaccgctttaatgggcgaacagcccaacccttgggaccgactacagccccaggatgcgatgagccgacatcgaggtgccaaacctccccgtcgatgtggactcttgggggagataagcctgttatcccctccacatcgacggggaggtttggcacctcgatgtcggctcatcgcatcctggggctgtagtcggtcccaagggttgggctgttcgcccattaaagcggtacgcgagctgggttcagaacgtcgtgagacagttcggtccctatccgtcgcgggcgcaggaaatttgagaggagctgtccttagtacgagaggaccgggatggacgcaccgctggtgtaccagttgttctgccaagggcatcgctgggtagctatgtgcggacgggataagtgctgaaagcatctaagcatgaagcccccctcaagatgagatttcccattccgcaaggaagtaagatccctgaaagatgatcaggttgataggtctgaggtggaagtgtggcgacacatggagctgacagatactaatcgatcgaggacttaaccaatttgaatgtatgcttactgttatctagttttgagagaacactctcaatggtttggtggcgatagcgaagaggtcacacccgttcccatgccgaacacggaagttaagctcttcagcgccgatggtagtcgggggtttccccctgtgagagtaggacgccgccaagcttttttattttatctaccatgtttttgtttatgaagcttataatattccgcagtagctcagtggtagagctatcggctgttaaccgatcggtcgtaggttcgagtcctacctgcggagccattgcttccatagctcagcaggtagagcacttccatggtaaggaagaggtcagcggttcgagcccgcttggaagcttatctaaatacgttgatctgaagcagtttccgcatgttatggaactgttatttttttatttggaacagtaaaaactgttactgattgcagcagttaaggtataggtgtttaaagcgcgctttctgatgaagttagccttgcttcaatgtttcaaagagattaacataattaattgttaaacggtattgacttttatcaaaaccttgatataattacttttgtcataatgagcagtatgtttagattgatcttagggttataccgtttggatttttactgaataaataataatacagtttaccgctatctgaggctgtattctggccatgctttacatttttacttgcggaagtagttcagtggtagaacatcaccttgccaaggtgggggtcgcgggttcgaatcccgtcttccgctccattttatcccaacgggatattgtgaaattgattgcgcccgtagctcaattggatagagcgtttgactacggatcaaaaggttaggggttcgactcctctcgggcgcgccataatatattttaaaatcgggaagtagctcagcttggtagagcacatggtttgggaccatggggtcgcaggttcgaatcctgtcttcccgaccattctcaaactttaaagataatatactggttttctttttttctcttttttttaaaaaatgcttgatttatagagagacaccgtggtatattattaaacgtcgctgatgaacagcagacaacaacaaaaagcttcggaaacaacttaaaaaaagttgttgacacaaaagaagctgagtggtaagataataaagctgcttcaacaagcggtaatgatctttgaaaactaaacaagacaaaacgtacctgttaattcaaagttttaaataaatcgcacagcgatgtgcgtagtcagtcaaactactttatcggagagtttgatcctggctcaggacgaacgctggcggcgtgcctaatacatgcaagtcgagcggacagatgggagcttgctccctgatgttagcggcggacgggtgagtaacacgtgggtaacctgcctgtaagactgggataactccgggaaaccggggctaataccggatggttgtttgaaccgcatggttcagacataaaaggtggcttcggctaccacttacagatggacccgcggcgcattagctagttggtgaggtaacggctcaccaaggcgacgatgcgtagccgacctgagagggtgatcggccacactgggactgagacacggcccagactcctacgggaggcagcagtagggaatcttccgcaatggacgaaagtctgacggagcaacgccgcgtgagtgatgaaggttttcggatcgtaaagctctgttgttagggaagaacaagtgccgttcaaatagggcggcaccttgacggtacctaaccagaaagccacggctaactacgtgccagcagccgcggtaatacgtaggtggcaagcgttgtccggaattattgggcgtaaagggctcgcaggcggtttcttaagtctgatgtgaaagcccccggctcaaccggggagggtcattggaaactggggaacttgagtgcagaagaggagagtggaattccacgtgtacatgccccttatgacctgggctacacacgtgctacaatggacagaacaaagggcagcgaaaccgcgaggttaagccaatcccacaaatctgttctcagttcggatcgcagtctgcaactcgactgcgtgaagctggaatcgctagtaatcgcggatcagcatgccgcggtgaatacgttcccgggccttgtacacaccgcccgtcacaccacgagagtttgtaacacccgaagtcggtgaggtaaccttttaggagccagccgccgaaggtgggacagatgattggggtgaagtcgtaacaaggtagccgtatcggaaggkgcggctggatcacctcctttctaaggattttaacggaatataagaccttgggtcttataaacagaacgttccctgtcttgtttagttttgaaggaactttgattctttcatatggtagatgggcctgtagctcagctggttagagcgcacgcctgataagcgtgaggtcggtggttcgagtccactcaggcccaccatctttacccaatacggggccttagctcagctgggagagcgcctgctttgcacgcaggaggtcagcggttcgatcccgctaggctccaccaacgtgttctttgaaaactagataacagaagtaattcacattcaattagtaatgcaagatatcacgtagtgattctttttaacggttaagttagaaagggcgcacggtggatgccttggcactaggagccgatgaaggacgggacgaacaccgatatgcttcggggagctgtaagcaagctttgatccggagatttccgaatggggaaacccaccactcgtaatggagtggtatccatatctgaatacataggatatgagaaggcagacccggggaactgaaacatctaagtacccggaggaagagaaagcaaatgcgattccctgagtagcggcgagcgaaacgggaccagcccaaaccaagaggcttgcctcttggggttgtaggacactctgtactaaggtagcgaaattccttgtcgggtaagttccgacccgcacgaaaggcgcaacgatctgggcactgtctcaacgagagactcggtgaaattatagtacctgtgaagatgcaggttacccgcgacaggacggaaagaccccgtggagctttactgcagcctgatattgaatgttggtacagcttgtacaggataggtaggagccttggaaaccggagcgccagcttcggtggaggcatcggtgggatactaccctggctgtattgaccttctaacccgccgcccttatcgggcggggagacagtgtcaggtgggcagtttgactggggcggtcgcctcctaaaaggkaacggaggcgcccaaaggttccctcagaatggttggaaatcattcgcagagkgtaaaggcacaagggagcttgactgcgagacctacaagtcgagcagggacgaaagtcgggcttagtgatccggtggttccgcatggaagggccatcgctcaacggataaaagctaccccggggataacaggcttatctcccccaagagtccacatcgacggggaggtttggcacctcgatgtcggctcatcgcatcctggggctgtagtcggtcccaagggttgggctgttcgcccattaaagcggtacgcgagctgggttcagaacgtcgtgagacagttcggtccctatccgtcgcgggcgcaggaaatttgagaggagctgtccttagtacgagaggaccgggatggacgcaccgctggtgtaccagttgttctgccaagggcatcgctgggtagctatgtgcggacgggataagtgctgaaagcatctaagcatgaagcccccctcaagatgagatttcccattccgcaaggaagtaagatccctgaaagatgatcaggttgataggtctgaggtggaagtgtggcgacacatggagctgacagatactaatcgatcgaggacttaaccaatttgaatgtatgcttactgttatctagttttgagagaacactctttaaaaaaactattgtcatattttcaaaagggtgttatattattaaacgtcgctgatgaacagcagacaacaacgaaaagcttcggaaacaacttgaaaaaagttgttgacataaaagaagctgagtggtaagataataaagctgcttcaacaagcggtaatgatctttgaaaactaaacaagacaaaacgtacctgttaattcaaagttttaaataaatcgcacagcgatgtgcgtagtcagtcaaacactttatcggagagtttgatcctggctcaggacgaacgctggcggcgtgcctaatacatgcaagtcgagcggacagatgggagcttgctccctgatgttagcggcggacgggtgagtaacacgtgggtaacctgcctgtaagactgggataactccgggaaaccggggctaataccggatggttgtctgaaccgcatggttcagacataaaaggtggcttcggctaccacttacagatggacccgcggcgcattagctagttggtgaggtaacggctcaccaaggcgacgatgcgtagccgacctgagagggtgatcggccacactgggactgagacacggcccagactcctacgggaggcagcagtagggaatcttccgcaatggacgaaagtctgacggagcaacgccgcgtgagtgatgaaggttttcggatcgtaaagctctgttgttagggaagaacaagtgccgttcaaatagggcggcaccttgacggtacctaaccagaaagccacggctaactacgtgccagcagccgcggtaatacgkaggtggcaagcgttgtccggaattattgggcgtaaagggctcgcaggcggtttcttaagkctgatgtgaaagcccccggctcaaccggggagggtcattggaaactggggaacttgagtgcagaagaggagagtggaattccacgtgtagcggkgaaatgcgtagagatgtggaggaacaccagtggcgaaggcgactctctggtctgtaactgacgctgaggagcgaaagcgtggggagcgaacaggattagataccctggtagtccacgccgtaaacgatgagtgctaagtgttagggggtttccgccccttagtgctgcagctaacgcattaagcactccgcctggggagtacggtcgcaagactgaaactcaaaggaattgacgggggcccgcmcaagcggtggagcatgtggtttaattcgaagcaacgcgaagaaccttaccaggtcttgacatcctctgacaatcctagagataggacgtccccttcgggggcagagtgacaggtggkgcatggttgtcgtcagctcgtgtcgtgagatgttgggttaagtcccgcaacgagcgcaacccttgatcttagttgccagcattcagttgggcactctaaggtgactgccggtgacaaaccggaggaaggtggggatgacgtcaaatcatcatgccccttatgacctgggctacacacgtgctacaatggacagaacaaagggcagcgaaaccgcgaggttaagccaatcccacaaatctgttctcagttcggatcgcagtctgcaactcgactgcgtgaagctggaatcgctagtaatcgcggatcagcatgccgcggtgaatacgttcccgggccttgtacacaccgcccgtcacaccacgagagtttgtaacacccgaagtcggtgaggtaaccttttaggagccagccgccgaaggtgggacagatgattggggtgaagtcgtaacaaggtagccgtatcggaaggtgcggctggatcacctcctttctaaggattttaacggaatataagaccttgggtcttataaacagaacgttccctgtcttgtttagttttgaaggatcattcgattcttcgagatgttgttctttgaaaactagataacagaagtaattcacattcaattagtaatgcaagatatcacgtagtgattctttttaacggttaagttagaaagggcgcacggtggatgccttggcactaggagccgatgaaggacgggacgaacaccgatatgcttcggggagctgtaagcaagctttgatccggagatttccgaatggggaaacccaccactcgtaatggagtggtatccatatctgaatacataggatatgagaaggcagacccggggaactgaaacatctaagtacccggaggaagagaaagcaaatgcgattccctgagtagcggcgagcgaaacgggaccagcccaaaccaagaggcttgcctcttggggttgtaggacactctgtacggagttacaaaggaacgaggtagatgaagaggtctggaaaggcccgccataggaggtaacagccctgtagtcaaaacttcgttctctcctgagtggatcctgagtacggcggaacacgtgaaattccgtcggaatccgggaggaccatctcccaaggctaaatactccctagtgaccgatagtgaaccagtaccgtgagggaaaggtgaaaagcaccccggaaggggagtgaaagagatcctgaaaccgtgtgcctacaagtagtcagagcccgttaacgggtgatggcgtgccttttgtagaatgaaccggcgagttacgatcccgtgcaaggttaagcagaagatgcggagccgcagcgaaagcgagtctgaatagggcgaattgagtacgtggtcgtagacccgaaaccaggtgatctacccatgtccagggtgaagttcaggtaacactgaatggaggcccgaacccacgcacgttgaaaagtgcggggatgaggtgtgggtaggggtgaaatgccaatcgaacctggagatagctggttctctccgaaatagctttagggctagcctcaaggtaagagtctcggaggtagagcactgattggactaggggcccctaccgggttaccgaattcagtcaaactccgaatgccgatgacttatccttgggagtcagactgcgagtgataagatccgtagtcgaaagggaaacagcccagaccgccagctaaggtcccaaagtatacgttaagtggaaaaggatgtggagttgcttagacaaccaggatgttggcttagaagcagccaccatttaaagagtgcgtaatagctcactggtcgagtgactctgcgccgaaaatgtaccggggctaaacgtatcaccgaagctgcggactgttcttcgaacagtggtaggagagcgttctaagggctgtgaagcaagaccggaaggacttgtggagcgcttagaagtgagaatgccggtatgagtagcgaaagaggggtgagaatcccctccaccgaatgcctaaggtttcctgaggaaggctcgtccgctcagggttagtcgggacctaagccgaggccgaaaggcgtaggcgatggataacaggttgatattcctgtaccacctcctcaccatttgagcaatggggggacgcaggaggatagggtaagcgcggtattggatatccgcgtccaagcagttaggctgggaaataggcaaatccgtttcccgtgaaggctgagctgtgatggcgagcgaattatagtagcgaagttcctgattccacactgccaagaaaagcctctagcgaggtgagaggtgcccgtaccgcaaaccgacacaggtaggcgaggagagaatcctaaggtgatcgagagaactctcgttaaggaactcggcaaaatgaccccgtaacttcgggagaaggggtgctctgttagggtgcaagcccgagagagccgcagtgaataggcccaggcgactgtttagcaaaaacacaggtctctgcgaagccgtaaggcgaagtataggggctgacgcctgcccggtgctggaaggttaagaggagcgcttagcgtaagcgaaggtgcgaattgaagccccagtaaacggcggccgtaactataacggtcctaaggtagcgaaattccttgtcgggtaagktccgacccgcacgaaaggcgcaacgatctgggcactgtctcaacgagagactcggtgaaattatagtacctgtgaagatgcaggttacccgcgacaggacggaaagaccccgtggagctttactgcagcctgatattgaatgttggtacagcttgtacaggataggtaggagccttggaaaccggagcgccagcttcggtggaggcatcggtgggatactaccctggctgtattgaccttctaacccgccgcccttatcgggcggggagacagtgtcaggtgggcagtttgactggggcggtcgcctcctaaaaggtaacggaggcgcccaaaggttccctcagaatggttggaaatcattcgcagagtgtaaaggcacaagggagcttgactgcgagacctacaagtcgagcagggacgaaagtcgggcttagtgatccggtggttccgcatggaagggccatcgctcaacggataaaagctaccccggggataacaggcttatctcccccaagagtccacatcgacggggaggtttggcacctcgatgtcggctcatcgcatcctggggctgtagtcggtcccaagggttgggctgttcgcccattaaagcggtacgcgagctgggttcagaacgtcgtgagacagttcggtccctatccgtcgcgggcgcaggaaatttgagaggagctgtccttagtacgagaggaccgggatggacgcaccgctggtgtaccagttgttctgccaagggcatcgctgggtagctatgtgcggacgggataagtgctgaaagcatctaagcatgaagcccccctcaagatgagatttcccattccgcaaggaagtaagatccctgaaagatgatcaggttgataggtctgaggtggaagtgtggcgacacatggagctgacagatactaatcgatcgaggacttaaccaatttgaatgtatgcttactgttatctagttttgagagaacactctcaatggtttggtggcgatagcgaagaggtcacacccgttcccatgccgaacacggaagttaagctcttcagcgccgatggtagtcgggggtttccccctgtgagagtaggacgccgccaagctatcttaacccagttcatgatgaactgggttttttatatgaaagatcacaatgtctgcatcaattcattgccaacttcttcagccatttctaaagctatttgtaaatgaaccaaggcttttttatggttattcaaatcatcgtagtttcctgcaataacaaaaagacatttgatcatatttactttgtatgtaggatgtttcttatatttatcataagacattttcacataatacatagaaacatgagtctgtttcatgtgataaaaaacctcggccatcttaaaataaaattccgctttttctatttcatcagtgactctggcaatcttagcttctgccttttgataatgattaatggctgctacataatccccgtttctaaattcgtacattcctctaaaaaaatgatcatagtatttcagcagcttcgttaacttctgcccggccccttcagattttcttaaatactcccaagtttccaactttttagaagaatctgacgggaaaagatagtccatcatcaaattatgtctaaaactgatcagctgataatacagtaataaatcttggtcctcttccatttcctcgatcattttttctacttctgctttgcacttttcagcgttttttgcatcaaatctgtttatatactcatgccaatcattaattttaacccccacagtagcagacggaatggcactcataaaactcgtccccctccagattaaccctttttatgaaaatggtagcacaagagaaggattgataactttgttgcggaaaattttcgacatgccgcaacgataaatttcccgagtaggaatctcattactacacaacaaatacttgaaataaaaaaacggaatcacatttggattccgcttaacacttacgattactacccccctgttagcataggaggggtattcggttggattcgatccggtcgctatcgctgccgctcggcgactgccgtcgccttacgctcccttctctcmccaactatttttcccgatcttttttctccttcaagagtaacttagtcccaattcmctagtcaagttcttgggctttgcccaaacccaccaacggatggccgttggatgccaatactcaatccccccaaccccccgaatcttcgggggactccctcgccggttggcgtcaaacaaacgggtttgtttgagtgctgaaagggttcgggtggcgctgaatgagtcaactccttaatcctccctacggtccggttaccgttgactcacgccaagagcgcctgctgcccatttagagataagacagctccagcgcttttcttatgtattcttcttctgtgatttctccatgaaaccgcctttttaaaagcttttcctcttctgccgtcagcactaagccctcaaagccaagggttgctcttacatatttcatccctgtttcaaaatcaatcttttgcattactaccccctcctctttatcaaamgcccctccgggtcatttccgccagtacgccccaatttatttggtgcgtataactgggcactccgtgaccgctcctaaattccaaaacaaactcaaacacaaaagaacccagtcagccccctgtcatgactggatttttcctctagtttaggtatgcagcgctccttttgaaatgcacccttttcaaaacaactcaaacataataaagggtgcaacacttgaaggtgtctggcctctccatagcgaacctattttacgaggtgattcgtgatggatatgggagtcaaattatcgtccaaagacgtcgcaaaacacctcggtatagagccggtgactgtccgcaagtatgccagtatgcttgaagaacaaggctactccttcaataaagattcaaaaggatggcgactctataccgaggatgacgtaaagactttagagtatctatgtacaatgactaagatcaatggacactcactcgacgaaacggtaaagcatatagcaagcctgtatcgttcaaaactgaccatatcggataccgctacatcgctacaggacaatcctttggttgaattcatgaagcgacaggaagaattcaacmaaaggatggcagaacggatggaacaattcgaaaaaagacagcaagaaaggcacgagacacycactgccgcattacgggagtcgctagagacacaaagaatgatcgcagccactaaacaaaaaaagtggtggcaattttggaagaacagctaataccgccaacagtcaccgctctaattcatggtccttgtatttattcgcttctctaggcattccagccgtacggaaaaacgatgccgctaatttccgcacccttggcaacttctctttagcccactgcaccattttgtctttccactgttccagtacggccacccgatctcttaacgtcttgttttcctcgttcagcgactgaaactctttattttgctcctgggcgaagttcagcagctcaccatmcctacctctttccgctttaaggctttttttcgtttcggcgtgctttttgacctcattgtctttttgttcgctcagagacaacgtcagccgcttcaaatccctattctccgttctcagctcgctgttttctgttttcagagcagacagctcttctttcacttcctgacggagttcttctcgttgctcttccgtaaattctttagtcagcttacgccgcatccccctttttgctttttcgacctcctcgttcataaccgtctgcagatccgagagcatcttatctttcgagtctgcccgctccctttcttcgacggctatggacttccaccgttccttctcttccgtttccgcttcaagttgccgcgacagttgcgccgccattttcccttgatcttccgcataagcatacaaattttcaagttcatgctgcggcacagtcaccttgtcttttttgaaaagaccggctttttcatactcaacggtcgggatcctctgctcttgcgttttagccgtcagcgcttcttttttgacggaaaccactgattcgaccgctcggttctgctgttccaattccgctttccgtttttccttcaaagcgatctcagcgttcagccgctcaagctccgctttccgctgattgattttgtactggtkaacattttcatgcttcttttcgcttggttctccccgctccaagtcaaaaccgctcttcaccatatgccggtgaaaatcatcctgaatagctttcatcttcagcttgccgttaaagaaatctttagcagaaagccggccgtcctcggtgatcggcacaatcccgacatgcatgtgcggggtcgcttcatccatatgtaccgtggcatacaacatattttccgcagtgtatttctctttcagatgatccactgccgcttcaaaatagcgccgctgctccgtctcgctcaatccgttcatgtagtcaggactggccgtaatcaaaaactcgctcactaaaacggcatcgtcccgcactttccgtttgaccctgccctcaattttttcacgaaccgcctgtgcgtagctgatcggttgaccgttaacaagatcataattgagatgcgaccggccacgatcaatgttttcatttttgcttttttgaaactcccgctgattgtgtttttgcgtcccattcagtctatctttcttgtatttttccatcctgataaccgcataatttgccacacgaaccccccccaatacataccactatattagggttatggtaacacaaaatttcagttttggtgtaacgcactacaccaaattgttcctacggattcaatttggacgtgcgacctgcggtgccggtggctctctcattctcgctatcgcatcgaaagttcatgccacttgtcggcaacatgccgmcccgatttttccgccgatgagagatcggcaggaaatcggaaaaccctttctgctcccgcagcatttaacacatgaacattttattctatgtactaaattttcatattttattatagccgcaaaatccgcaatcaaaaaaaggtcaaataggtatttggttactttttatttgaaaatatgtataattttgttgaaaaaaccatgatatatgatacggtttattggaactagaaaagtaaaaggagtgaaaaataagwaatgatccccaaaaaaaagagcaagaaatatttcctgctacaaacgtttcttttgtaaaaaaacagaatcccagaaccaataaattaaggccaacaaaaagctaaagacgtacagttcatacctaacaaaaacaataagaccataatcagtcaataaagccaaaaccgagcaaacaataaaagcagacaaaaaataaactaacaagtaacggatattaaacttttgtggctttctatgtaaaaaaagttgtataggtgtagcaaaaataaaataagcaacaaagataaaaagacttgtcacctgaaaataaccaaaaccaaaatctggwggagtaaacacaatcatataggcaaatgtagctgatataacggaaaggacaaccatacatacataaccaaaaatcctactcaaaatacgcatccaattaaactccttttcgctaaattaatttaatttcaatggaggggttccgcttgaagaagatttatattctatcattctttataattctgctttgtttatccgtaacaacaaatacttcacacgcaaaaaatttatccaatgatgttgaaacaaatgtaaaagatggtmacgtaacactaaaagtaaactatacaggcgatacatacaagtttttcaagaacggaaaatctatatacaccggttcgtctaatgagatcaatagtgatatttcaaaaattggagacaaatataaaatcggaatttatcaagaaaacactctaaaaaaagwgattacwctcaacgtaaccaatgatctgcaagaagaagccaataaaataacagwttcagcagaaacaaaagaagaatcatataatgaaaaactaatggactacaagattaaaaacagtcatataaatgttgtcgcaactactgacgacgtaaaactctcatggaaccaactccctgacgaagatgggatttatgaaatatacagagacgacaaaaaaataggcgagacaacagatttaaactttacagataaaaatgtaaaacctggtgaaagatataactattctattaatgtaagcgtaaaaccatcaaaagaacaacaagaaaaaatggagaaaaaattcgatgaactcggatcaactctctctgataaggaaaaagaagaggtcatgagtgtcgaaggttcattatcaacaattgttgatatgcctaaaaacgaagaatcatatttgaaatctaaaaagtctgtattaaacgaggtaacggataacggaaaactttctgcacaagggaagctcccaaaagataatatgcatggttgggcatatagaacttttattccttacaagtctgtagcagatcccaaaccagaatttaaaaagacatatctaaaaggtgacggtagagatttttccgctacttcaaataaattcagaacagaatcaagtgttaatacacaattcactggaccaacgagcattacaatgtacaaaaaagtatcacaatcagtaagatgtaaagatgcagcatgcactaaagttttagataaaaaaactgctagtaccgctggcatgaaactatatatcaatagcaaaaaaagtgattatcttcattggacagtaacacatgcaattggaattccattcggagcatactacccaaaaattgactacgattacaatgtaatgctgacaaaaggtatggcatctatatcaggaaaacatgataaagctccaaatcatgagttttatgtaagcgcaccatcctcatctaatgcgactacaatctacagatatgcagtcaaatcaaaaaaagattttgtagagctatggttcgccaaagctaagaaatcatggaaaacagaactattttaatcaaataaaaaaagcagaccatcaaccggtctgctttttatttgattatgtaatttttaatgcctggatgccagtaagccattacctcaaatgcttcgttcgccacctcgtcatcctcttcctcgatcttgacgagatcgccgtcctccgcatcaccaaggttcagctccttatgaatttccttcaaaatgccgccatagccaataagccggcgagcagaaagtgcatcatctaaataaaacaccgtgttcagattgtcttctgtcmccttgctgccacgcatcacatccgtatccttgactggatattttgaaatctccagaacggctttgtgctccatcatggcttcccgcacatcgctctcgatctgctcggcatcaatgttagcttttcctttaaccctacgtatgtcaacgatcggcgtgtaatccagtttcatcgcccttttccaaagacttgtccagtccgtctgtttgatgtaattctttcccgtgaaatagcttttctttacaggtaaaagcacatgaaaatgaggatgatatgtatcttcttcatgattttttgttatctctaaagctctaaaataaccaagaatcgctttatcaactcttttatatttcaccaaccgattgaatcccttcatcatgtcagagatcgcaggtttcagaccgtccccttcaacatttcggactgtcagcgtgagaaaaatccatctacagccgtactgacgattggcttcctcaacaatcaatttattatgataagcaatttttaacgacctgcgccaagcacacatcgggcataacctcactttgcaaaaatgggcttgatacagctttagtttatccgtctccggatctcttttaamcgaaagacactctgcacaaccattcagcttttcagccttcttgccatagtaaggtgctccaattttggtctgtaatgcttcgtaatgctccgccataagatttgcccgtctcttttttcctttccaatcccgctttttacctgttgcggtcttgtcctcaaggatgctataattatgttcaactgaattcaaacgaaacgaaactcctttctgtgctagtaatctagcgttctattatttttggtggtacttaaataatagcagaaggagttttgtactgtcaaaatacttctaaacccttgacagacaagggatgagcgtgattttttaaaatcttgttgtttctatatagtatcaagataagaaaagacccgatttcgactccgtcaaaatcgcaaaaaaggccggcagaattgccggtctttttttaaaacccaaaacctaagatcaaaaccattcttcccccatagggggagatttttcaaaaaatcggccctgcagccgcgcattattttagatattcaatatctttaaaaaaccgcacgtctccacatgaccaacacatgaacctccacacagtcaacacatggccttttctatcaacacgcagtcaacacatccagccatggtcaaatgcgtagcattatttatttcgccggtgcgaaaaaacgagcacctttcgataaggtgcgtaagtggacactccgctactcgctacttaaaaaaggtgaacagctaatctgcatacctaaaggcgtcctcagaatgctcagattcgtttctacgggcttcaaataaaaaacgcccccttttataaagggaacccaataaaacgccttaaaaggctttaaaacgattttttgcaataaaaaaaagcagactctaagagtccgccccatttaggccttaaattttccttatgttgcatttcgagaagcaactgaaatctccccatgagaaacagaataacctgcaccgccggctaacagacccaaaatgaggacagcagcaaaaagacttttaaatttcataatgagaatcactcctctgaatttgtctttgagcgcacaccatttcattgtaaaagtatatagaatcttccatgcgcctcttcttagtatagaattctgcagccactaaagctagctcttcaaagtatggatagcctttttcggtctttagtccgtacaatgcatcttttacattttgtctgttagcagtatcaataaataatgcttttagtacattcaacaatttcatgtaaaattcattttcgaacgcttcagcttcctttactgcctttttaaaaaagtccatcccctcgatcatttcaccgttctgaaagtgaataagggacaaatcgtaataagcctgaatgatttctttagcccccgccttttttgcaagcttaatggcttggtgatacaaaggaatagccattggactttgcaaacggttatagctattgcccatatttaaatatgcaaatgtctgcatcaattcattgccaacttcttcagccatttctaaagctatttgtaaatgaaccaaggcttttttatggttattcaaatcatcgtagtttcctgcaataacaaaaagacatttgatcatatttactttgtatgtaggatgtttcttatatttatcataagacattttcacataatacatagaaacatgagtctgtttcatgtgataaaaaacctcggccatcttaaaataaaattccgctttttctatttcatcagtgactctggcaatcttagcttctgccttttgataatgattaatggctgctacataatccccgtttctaaattcgtacattcctctaaaaaaatgatcatagtatttcagcagcttcgttaacttctgcccggccccttcagattttcttaaatactcccaagtttccaactttttagaagaatctgacgggaaaagatagtccatcatcaaattatgtctaaaactgatcagctgataatacagtaataaatcttggtcctcttccatttcctcgatcattttttctacttctgctttgcacttttcagcgttttttgcatcaaatctgtttatatactcatgccaatcattaattttaacccccacagtagcagacggaatggcactcataaaactcgtccccctccagattaaccctttttatgaaaatggtagcacaagagaaggattgataactttgttgcggaaaattttcgacatgccgcaacgataaatttcccgagtaggaatctcattactacacaacaaatacttgaaataaaaaaacggaatcacatttggattccgcttaacacttacgattactacccccctgttagcataggaggggtattcggttggattcgatccggtcgctatcgctgccgctcggcgactgccgtcgccttacgctcccttctctcaccaactatttttcccgatcttttttctccttcaagagtaacttagtcccaattcactagtcaagttcttgggctttgcccaaacccaccaacggatggccgttggatgccaatactcaatccccccaaccccccgaatcttcgggggactccctcgccggttggcgtcaaacaaacgggtttgtttgagtgctgaaagggttcgggtggcgctgaatgagtcaactccttaatcctccctacggtccggttaccgttgactcacgccaagagcgcctgctgcccatttagagataagacagctccagcgcttttcttatgtattctcaagccgtaaaatcccaataaccaaaaaaagaaccctgcagcgcgggactgaccccataatatgagacaaacaaaaaacaccttcaagtttgaaaacggatcgttgttatccgaaattagacttggaggtgttttttctatggggacaagagtgagttatccggttgaagcgaaacagaaggctgtagaaatgagattggcaggcgtacctatgaaagagatcatgcaggagttgaatattaagaataagacacaggttcagacatgggttagatggtataaggctggtgatacacatcgattcgaacagcctgttggaaagcaatacacttacggaaaaggtccggagtattcttccgatttagagaaactgcaggcagagattcgttacctgagacaacagaatgaagttttaaaaaagtacaacgaattggaaaggaagttgatagcgaaacgtcagtcgaacttgtagaaatattgcacagcacaatgaccgtacaggatatctgtattcatttaggtatctctcgagcgtcttattatcgttggaagaagaatctgatgaaggatcatcccaagcgccatttggaaaaacaaatcggcacgttgtgccgagagcacaagtatcgatatggatatcgaaaaatcacagccatactaaaaaagagaatgtgtattaaccataaaacggttcagcgcattatgcagaaaaatcaatggcagtgtcgggttaaggtgaaaaagcgcaagaaggatgggcagccatatgccgtggtcgataatatattggatcggaactttcagtctgatcgtcctctggaaaagctagtaacggatatcacatatttgccttatgggcagaaacaattgtatctttccagtatattggatttatacaatggagaagtgattgcttttacgattggcgatagacaggacacagactttgtcttacacacacttgatcagctgcccgcactgccagagaactgtgtgttacatagtgaccaaggttctgtttatacatcttatgagtatcagaaagctgttaaaacaaaaggcattaccatgagcatgtcccgcaaagggacgcccgctgataatgcctccatcgaatcgtttcattcctcactaaagtctgaaacgttctacctcgacaggttggaaagcactacgacgaccatcgtagaacaaactgtcgaaacctatatacactattataacaacattcgtattcaaacgaaactaaacaaccagccgccggtcacataccgacagctggctgcttaaaggtgttttgatccctgtctcaaaaacgggggtcagtcccgcgcaagggttcttttttcatttatacttcaatagcgaaacgtcagtcgaacttgtagaaatattgcacagcacaatgaccgtacaggatatctgtattcatttaggtatctctcgagcgtcttattatcgttggaagaagaatctgatgaaggatcatcccaagcgccatttggaaaaacaaatcggcacgttgtgccgagagcacaagtatcgatatggatatcgaaaaatcacagccatactaaaaaagagaatgtgtattaaccataaaacggttcaacgtattatgcagaaaaatcaatggcagtgtcgggttaaggtgaaaaagcgcaagaaggatgggcagccatatgccgtggtcgataatatattggatcggaactttcagtctgatcgtcctcttgaaaaactagtaacggacatcacatatttgccttatggacagaaacaattgtacctttccagtatattagatttatacaatggagaagtgattgcttttactattggggataagcaggacacagcctttgtcttagacacacttgatcagctaccaatgctgcctgagaactgcgtgttacatagtgaccaaggttctgtgtatacatcttacgagtatcaaaaagctgttaaaacaaaaggcattaccatgagcatgtcccgcaaagggacgcccgctgataatgcctccatcgaatcgtttcattcctcgctaaagtctgaaacgttctatcttaacagcattgatcgaactacgactgccatcgtagaacgcactgtcatagaatacattcattattataacaatattcgtattcaaaccaaactaaacaaccaatcaccgataaactatcggcaattggctgtttaaaaggtgttttgacccctgtctcaaaaacggggggcagtcccctagtcatcctactttttatcttcttccaagtagtataaataaccatctcatataatcactacattatgaaaacgtaattctgaattatactttattatgattttttcttttaaacataggaaactgcaccaataaatttaaatgaatagttttttgcagttatttctttctccctgccgtcatattcaaaattatataaaagaacagcagcattgatttgatcagggagtgtggtacctactatgtcttcgaactcagttcggatcgcagtctgcaactcgactgcgtgaagctggaatcgctagtaatcgcggatcagcatgccgcggtgaatacgttcccgggccttgtacacaccgcccgtcacaccacgagagtttgtaacacccgaagtcggtgaggtaaccttttaggagccagccgccgaaggtgggacagatgattggggtgaagtcgtaacaaggtagccgtatcggaaggtgcggctggatcacctcctttctaaggattttaacggaatataagaccttgggtcttataaacagaacgttccctgtcttgtttagttttgaaggatcattccttcaaaacataggaacacctgctaaatgcgccacttcctgtggcaacgcatgtgttagcatgtcctatgcgttgttctttgaaaactagataacagaagtaattcacattcaattagtaatgcaagatatcacgtagtgattctttttaacggttaagttagaaagggcgcacggtggatgccttggcactaggagccgatgaaggacgggacgaacaccgatatgcttcggggagctgtaagcaagctttgatccggagatttccgaatggggaaacccaccactcgtaatggagtggtatccatatctgaatacataggatatgagaaggcagacccggggaactgaaacatctaagtacccggaggaagagaaagcaaatgcgattccctgagtagcggcgagcgaaacgggatcagcccaaaccaagaggcttgcctcttggggttga
